(19) United States
(12) Patent Application Publication
(10) Pub. No.: US 2020/0085069 A1
(43) Pub. Date: Mar. 19, 2020

(54) ANTIFUNGAL COMPOSITION AND METHOD OF USE

(71) Applicant: BiOWiSH Technologies, Inc., Cincinnati, OH (US)

(72) Inventors: Michael Stanford SHOWELL, Cincinnati, OH (US); Richard S. CARPENTER, West Chester, OH (US); John P. GORSUCH, Cincinnati, OH (US)

(21) Appl. No.: 16/573,671

(22) Filed: Sep. 17, 2019

Related U.S. Application Data
(60) Provisional application No. 62/732,342, filed on Sep. 17, 2018.

(51) Int. Cl. A01N 63/04; A01N 63/02; A01N 25/12

(52) U.S. Cl. CPC A01N 63/04; A01N 25/12; A01N 63/02

(57) ABSTRACT

The present invention relates to an antifungal composition including Bacillus subtilis 34 KLB and Bacillus amyloliquefaciens. The antifungal composition can be used to treat a variety of diseases in plants, including Black Sigatoka, Fusarium wilt, and anthracnose.

### RELATED APPLICATION

[0001] This application claims priority to and the benefit of U.S. Application No. 62/732,342, filed on Sep. 17, 2018, the contents of which are incorporated by reference in their entirety.

### INCORPORATION BY REFERENCE OF SEQUENCE LISTING

[0002] The contents of the text file named “BIOW-019 SEQ LISTING.txt”, which was created on Sep. 16, 2019 and is 10.0 MB in size, are hereby incorporated by reference in their entireties.

### FIELD OF THE INVENTION

[0003] The present invention relates to antifungal compositions and the use thereof.

### BACKGROUND OF THE INVENTION

[0004] The use of antifungal agents to kill or prevent the growth of undesirable plant pathogenic organisms has been studied extensively. Although a number of antifungal agents are effective, they have drawbacks. For example, they can be very toxic and difficult to handle and not environmentally friendly, which limits their use. In addition, the problem of fungicide resistance may occur. Fungicide resistance occurs when a product is no longer effective at controlling a disease due to a shift in the genetics of the target pathogen organism. Fungicide resistance is due to natural selection of spores with less sensitivity due to either mutation or sexual recombination. It can be a very serious problem where fungicide resistance develops in a plant pathogen population.

[0005] There is a need for new antifungal compositions that are effective and environmentally friendly.

### SUMMARY OF THE INVENTION

[0006] One aspect of the present disclosure relates to an antifungal composition comprising a bacterial mixture, wherein the bacterial mixture consists essentially of Bacillus subtilis 34 KLB and Bacillus amyloliquefaciens at a ratio of about 10:1 to 1:10 by colony-forming unit (CFU), and wherein the antifungal composition can inhibit the growth of Ganoderma lucidum at least 10% more than either Bacillus subtilis 34 KLB or Bacillus amyloliquefaciens alone with the same CFU as the antifungal composition.

[0007] In some embodiments, the bacterial mixture is a powder. In some embodiments, each bacteria in the bacterial mixture is individually fermented, harvested, dried, and ground to produce a powder having a mean particle size of about 200 microns, with greater than 60% of the mixture in the size range between 100-800 microns.

[0008] In some embodiments, the bacterial mixture is a liquid.

[0009] In some embodiments, the antifungal composition has a bacterial concentration of 10⁹ to 10¹¹ CFU/g.

[0010] In some embodiments, the antifungal composition further comprises a water-soluble diluent. The water-soluble diluent can be selected from the group consisting of dextrose, maltodextrin, sucrose, sodium succinate, potassium succinate, fructose, mannose, lactose, maltose, dextrin, sorbitol, xylitol, inulin, trehalose, starch, cellobiose, carboxy methyl cellulose, dendritic salt, sodium sulfate, potassium sulfate, and a combination thereof.

[0011] The antifungal compositions disclosed herein can be used to treat a variety of diseases or conditions in plants.

[0012] One aspect of the present disclosure relates to a method of treating or preventing Black Sigatoka in a banana plant, the method comprising contacting the banana plant with the antifungal compositions disclosed herein.

[0013] One aspect of the present disclosure relates to a method of treating or preventing Fusarium wilt in a plant, the method comprising contacting the plant with the antifungal compositions disclosed herein. In some embodiments, the Fusarium wilt is caused by Fusarium oxysporum f. sp. cubense race 1 (Foc-1). Examples of plants include, but are not limited to, tomato, tobacco, legumes, cucurbits, sweet potatoes, mangos, Papayas, pineapple, coffee, spinach, and banana.

[0014] One aspect of the present disclosure relates to a method of treating or preventing anthracnose in a plant, the method comprising contacting the plant with the antifungal compositions disclosed herein. In some embodiments, the anthracnose is caused by Colletotrichum sp. Examples of plants include, but are not limited to, tomato, mango, Aloe, turfgrass, ash, birch, walnut, buckeye, elm, hornbeam, maple, oak, sycamore, Catalpa, dogwood, hickory, linden, and poplar.

[0015] One aspect of the present disclosure relates to a method of treating or preventing ghost spot in a plant, the method comprising contacting the plant with the antifungal compositions disclosed herein. In some embodiments, the ghost spot is caused by Cladosporium colocasiae. Examples of plants include, but are not limited to, tomato and taro.

[0016] One aspect of the present disclosure relates to a method of treating or preventing a leaf spot disease in a plant, the method comprising contacting the plant with the antifungal compositions disclosed herein. In some embodiments, the leaf spot disease is caused by Pseudocercospora ocimibasilici. Examples of plants include, but are not limited to, maple, tomato, turfgrass, ash, birch, walnut, buckeye, elm, hornbeam, oak, sycamore, Catalpa, dogwood, hickory, linden, mango, Papaya, and poplar.

[0017] One aspect of the present disclosure relates to a method of treating or preventing crown rot in a plant, the method comprising contacting the plant with the antifungal compositions disclosed herein. In some embodiments, the crown rot is caused by Colletotrichum musae, Chalara paradoxa, Fusarium pseudograminearum, Macrophomina phaseolina, or a combination thereof. Examples of plants include, but are not limited to, wheat, an apple tree, a cherry tree, a peach tree, banana, strawberry, and pineapple.

[0018] One aspect of the present disclosure relates to a method of treating or preventing stem blight in a plant, the method comprising contacting the plant with the antifungal compositions disclosed herein. In some embodiments, the stem blight is caused by Botrytis cinerea. Examples of plants include, but are not limited to, strawberries, fig, peach, and grapes.

[0019] One aspect of the present disclosure relates to a method of treating or preventing citrus mold in a plant, the method comprising contacting the plant with the antifungal compositions disclosed herein. In some embodiments, the citrus mold is caused by a Penicillium species. Examples of plants include, but are not limited to, orange, grapefruit, and lime.

[0020] One aspect of the present disclosure relates to a method of treating or preventing leaf blight in a plant, the method comprising contacting the plant with the antifungal compositions disclosed herein. In some embodiments, the leaf blight is caused by a Curvularia species, a Nigrospora species, a Phytophthora species, a Fusarium species, or a combination thereof. Examples of plants include, but are not limited to, turfgrass, taro, strawberry, almond, cherry, plum, apricot, and peach.

[0021] One aspect of the present disclosure relates to a method of treating or preventing fruit rot in a plant, the method comprising contacting the plant with the antifungal compositions disclosed herein. In some embodiments, the fruit rot is caused by a Mucor species. Examples of plants include, but are not limited to, tomatoes, potatoes, peppers, a fruit tree (e.g., apple or pear tree), and an ornamental plant.

[0022] One aspect of the present disclosure relates to a method of treating or preventing brown rot in a plant, the method comprising contacting the plant with the antifungal compositions disclosed herein. In some embodiments, the brown rot is caused by Mondinia fructicola. Examples of plants include, but are not limited to, a peach tree, an apricot tree, a plum tree, a nectarine tree, and cherries.

[0023] One aspect of the present disclosure relates to a method of treating or preventing black rot in a plant, the method comprising contacting the plant with the antifungal compositions disclosed herein. In some embodiments, the black rot is caused by Xanthomonas campestris, Xanothomonas campestris pv. Campestris, Guignardia bidwellii, or a combination thereof. Examples of plants include, but are not limited to, cyclamen, poinsettia, Primula, Impatiens, Begonia, Nicotiana, geranium, and sweet peas.

[0024] One aspect of the present disclosure relates to a method of treating or preventing gray mold in a plant, the method comprising contacting the plant with the antifungal compositions disclosed herein. In some embodiments, the gray mold is caused by a Botrytis species. Examples of plants include, but are not limited to, a grape plant, strawberry, peach, artichoke, asparagus, bean, beet, blackberry, and black-eyed pea.

[0025] One aspect of the present disclosure relates to a method of treating or preventing black mold in a plant, the method comprising contacting the plant with the antifungal compositions disclosed herein. In some embodiments, the black mold is caused by Alternaria solani, a Stemphyllium species, or a combination thereof. Examples of plants include, but are not limited to, a grape plant, tomato, and an ornamental plant.

[0026] One aspect of the present disclosure relates to a method of treating or preventing cigar-end rot in a plant, the method comprising contacting the plant with the antifungal compositions disclosed herein. In some embodiments, the cigar-end rot is caused by a Pestalotia species. Examples of plants include, but are not limited to, a banana plant, Liberian coffee tree, an avocado tree, and cocoa tree.

[0027] One aspect of the present disclosure relates to a method of treating or preventing blight caused by Xanthomonas axonopodis pv. dieffenbachiae in a plant, the method comprising contacting the plant with the antifungal compositions disclosed herein. Examples of plants include, but are not limited to, orange, pineapple, and lime.

[0028] One aspect of the present disclosure relates to a method of treating or preventing decay in a plant, the method comprising contacting the plant with the antifungal compositions disclosed herein. In some embodiments, the decay is caused by Acidovorax species, Enterobacter species, or a combination thereof. Examples of plants include, but are not limited to, watermelon, collard, and lettuce.

[0029] One aspect of the present disclosure relates to a method of treating or preventing late blight in tomatoes by Phythophthora infestans, the method comprising contacting tomato plants with the antifungal compositions disclosed herein.

[0030] One aspect of the present disclosure relates to a method of treating or preventing Cercospora leaf spot in a plant, the method comprising contacting the plant with the antifungal compositions disclosed herein. In some embodiments, the Cercospora leaf spot is caused by Cercospora ipomoea. Examples of plants include, but are not limited to, beach morning glory.

[0031] One aspect of the present disclosure relates to a method of treating or preventing branch canker and dieback in a plant, the method comprising contacting the plant with the antifungal compositions disclosed herein. In some embodiments, the branch canker and dieback is caused by Phoma sp. Examples of plants include, but are not limited to, milo.

[0032] One aspect of the present disclosure relates to a method of treating or preventing Verticillium wilt in a plant, the method comprising contacting the plant with the antifungal compositions disclosed herein. In some embodiments, the Verticillium wilt is caused by Verticillium dahliae. Examples of plants include, but are not limited to, strawberry.

[0033] One aspect of the present disclosure relates to a method of treating or preventing pineapple black rot in a plant, the method comprising contacting the plant with the antifungal compositions disclosed herein. In some embodiments, the pineapple black rot is caused by Chalara paradoxa, Ceratocystic paradoxa, Theilaviopsis paradoxa, or combinations thereof. Examples of plants include, but are not limited to, pineapple.

[0034] In some embodiments of any one of the above aspects, the plant is contacted with the antifungal composition monthly.

[0035] In some embodiments of any one of the above aspects, the method reduces the disease severity by at least 10% as compared to a control plant absent any treatment.

### BRIEF DESCRIPTION OF THE DRAWINGS

[0036] FIG. 1 shows the international disease assessment rating scale for Black Sigatoka and diagrams used to estimate percent disease on each treated leaf in this study.

[0037] FIG. 2 shows two approaches used to evaluate the inhibition of fungal growth in culture by BiOWiSH™ strains of bacteria: spotting a the test organism (e.g., Colletotrichum musae) in the center and spotting a BiOWiSH™ organism (e.g., BW283) to the left and right (left); and spotting culture plugs (e.g., Nigrospora sp.) on the growth medium 3 days after spotting the BiOWiSH™ organism (e.g., BW 283).

[0038] FIG. 3A shows a diagram of the procedure used to evaluate the growth of plant-pathogenic bacteria in culture by BiOWiSH™ strains of bacteria.

[0039] FIG. 3B shows the results of inhibition trials for two BiOWiSH™ strains (BW34 and BW283) for a plant-pathogenic (Enterobacter sp).

[0040] FIG. 4 shows the strong inhibition of Curvularia sp. by BiOWiSH™ strains BW34 (left) and BW283 (right) after 12 days at 22° C. The Curvularia sp. was taken from turfgrass with leaf blight and was cultured in 10% V8.

[0041] FIG. 5 shows no inhibition of P. palmivora by BiOWiSH™ strains BW34 (left) and BW283 (right) after 7 days at 23° C. The P. palmivora was taken from Papaya with fruit blight and was cultured in 10% V8.

[0042] FIG. 6 shows methods for determining in vitro plant-pathogen inhibition.

[0043] FIG. 7 shows the template used to measure appressed radial growth (mm) of fungal mycelium (left) and a petri dish displaying the radial mycelial growth of Botrytis cinerea in the presence of Bacillus amyloliquefaciens (right).

[0044] FIG. 8 shows a diagram of a Petri dish showing successful inhibition of a fungal plant pathogen by a bacterium (left) and a zone of inhibition produced by Bacillus amyloliquefaciens in the presence of Fusarium oxysporum f. sp. fragariae (right).

[0045] FIG. 9 shows the rating scale used to assess disease based on wilting and necrosis.

[0046] FIG. 10A shows a strawberry crown cross-section with degraded vascular tissue.

[0047] FIG. 10B shows growth of Macrophomina phaseolina out of the same crown after plating on acidified potato dextrose agar (APDA).

[0048] FIG. 11 shows results of laboratory tests for Black Rot disease control with BiOWiSH™.

### DETAILED DESCRIPTION OF THE INVENTION

[0049] The present disclosure is based, inter alia, on the discovery that a mixture of two organisms—Bacillus subtilis 34 KLB and Bacillus amyloliquefaciens, provided better antifungal performance than existing grower practice based on fungicides.

[0050] In some embodiments, Bacillus subtilis 34 KLB has the following sequence.

Bacillus subtilis strain 34KLB
(SEQ ID NO.: 1)
AGCTCGGATCCACTAGTAACGGCCGCCAGTGTGCTGGAATTCGCCCTTAG
AAAGGAGGTGATCCAGCCGCACCTTCCGATACGGCTACCTTGTTACGACT
TCACCCCAATCATCTGTCCCACCTTCGGCGGCTGGCTCCATAAAGGTTAC
CTCACCGACTTCGGGTGTTACAAACTCTCGTGGTGTGACGGGCGGTGTGT
ACAAGGCCCGGGAACGTATTCACCGCGGCATGCTGATCCGCGATTACTAG
CGATTCCAGCTTCACGCAGTCGAGTTGCAGACTGCGATCCGAACTGAGAA
CAGATTTGTGRGATTGGCTTAACCTCGCGGTTTCGCTGCCCTTTGTTCTG
TCCATTGTAGCACGTGTGTAGCCCAGGTCATAPGGGGCATGATGATTTGA
CGTCATCCCCACCTTCCTCCGGTTTGTCACCGGCAGTCACCTTAGAGTGC
CCAACTGAATGCTGGCAACTAAGATCAAGGGTTGCGCTCGTTGCGGGACT
TAACCCAACATCTCACGACACGAGCTGACGACAACCATGCACCACCTGTC
ACTCTGCCCCCGAAGGGGACGTCCTATCTCTAGGATTGTCAGAGGATGTC
AAGACCTGGTAAGGTTCTTCGCGTTGCTTCGAATTAAACCACATGCTCCA
CCGCTTGTGCGGGCCCCCGTCAATTCCTTTGAGTTTCAGTCTTGCGACCG
TACTCCCCAGGCGGAGTGCTTAATGCGTTAGCTGCAGCACTAAAGGGGCG
GAAACCCCCTAACACTTAGCACTCATCGTTTACGGCGTGGACTACCAGGG
TATCTAATCCTGTTCGCTCCCCACGCTTTCGCTCCTCAGCGTCAGTTACA
GACCAGAGAGTCGCCTTCGCCACTGGTGTTCCTCCACATCTCTACGCATT
TCACCGCTACACGTGGAATTCCACTCTCCTCTTCTGCACTCAAGTTCCCC
AGTTTCCAATGACCCTCCCCGGTTGAGCCGGGGGCTTTCACATCAGACTT
AAGAAACCGCCTGCGAGCCCTTTACGCCCAATAAtTCCGGACAACGCTTG
CCACCTACGTATTACCGCGGCTGCTGGCACGTAGTTAGCCGTGGCTTTCT
GGTTAGGTACCGTCAAGGTGCCGCCCTATTTGAACGGCACTTGTTCTTCC
CTAACAACAGAGCTTTACGATCCGAAAACCTTCATCACTCACGCGGCGTT
GCTCCGTCAGACTTTCGTCCATTGCGGAAGATTCCCTACTGCTGCCTCCC
GTAGGAGTCTGGGCCGTGTCTCAGTCCCAGTGTGGCCGATCACCCTCTCA
GGTCGGCTACGCATCGTCGCCTTGGTGAGCCGTTACCTCACCAACTAGCT
AATGCGCCGCGGGTCCATCTGTAAGTGGTAGCCGAAGCCACCTTTTATGT
CTGAACCATGCGGTTCAGACAACCATCCGGTATTAGCCCCGGTTTCCCGG
AGTTATCCCAGTCTTACAGGCAGGTTACCCACGTGTTACTCACCCGTCCG
CCGCTAACATCAGGGAGCAAGCTCCCATCTGTCCGCTCGACTTGCATGTA
TTAGGCACGCCGCCAGCGTTCGTCCTGAGCCATGAACAAACTCTAAGGGC
GAATTCTGCAGATATCCATCACACTGGCGGCCGCTCGAGCATGCATCTAG
AGGGCCCAATCGCCCTAT

[0051] One aspect of the present disclosure relates to an antifungal composition including a bacterial mixture, wherein the bacterial mixture consists essentially of Bacillus subtilis 34 KLB and Bacillus amyloliquefaciens. In some embodiments, Bacillus subtilis 34 KLB and Bacillus amyloliquefaciens are present at a ratio of about 20:1 to 1:20 by colony-forming unit (CFU). In some embodiments, Bacillus subtilis 34 KLB and Bacillus amyloliquefaciens are present at a ratio of about 15:1 to 1:15 by CFU. In some embodiments, Bacillus subtilis 34 KLB and Bacillus amyloliquefaciens are present at a ratio of about 10:1 to 1:10 by CFU. In some embodiments, Bacillus subtilis 34 KLB and Bacillus amyloliquefaciens are present at a ratio of about 10:1, 9:1, 8:1, 7:1, 6:1, 5:1, 4:1, 3:1, 2:1, 1:1, 1:2, 1:3, 1:4, 1:5, 1:6, 1:7, 1:8, 1:9, or 1:10 by CFU. In some embodiments, Bacillus subtilis 34 KLB and Bacillus amyloliquefaciens are present at a ratio of about 1:1 by CFU.

[0052] In some embodiments, Bacillus subtilis 34 KLB is the BW34 strain having any one of SEQ ID NO.: 2-19, or a combination thereof. In some embodiments, Bacillus amyloliquefaciens is the BW283 strain having any one of SEQ ID NO.: 20-136, or a combination thereof.

[0053] The antifungal composition can inhibit the growth of Ganoderma lucidum at least 10% more than either Bacillus subtilis 34 KLB or Bacillus amyloliquefaciens alone with the same CFU as the antifungal composition. In some embodiments, the antifungal composition can inhibit the growth of Ganoderma lucidum at least 50% more than either Bacillus subtilis 34 KLB or Bacillus amyloliquefaciens alone with the same CFU as the antifungal composition. In some embodiments, the antifungal composition can inhibit the growth of Ganoderma lucidum at least 80% more than either Bacillus subtilis 34 KLB or Bacillus amyloliquefaciens alone with the same CFU as the antifungal composition. In some embodiments, the antifungal composition can inhibit the growth of Ganoderma lucidum at least 90% more than either Bacillus subtilis 34 KLB or Bacillus amyloliquefaciens alone with the same CFU as the antifungal composition.

[0054] The antifungal composition can either be a powder or liquid. The antifungal composition can contain bacteria at a concentration between about 10⁶ and 10¹³ CFUs per gram, between about 10⁷ and 10¹³ CFUs per gram, between about 10⁸ and 10¹³ CFUs per gram, between about 10⁹ and 10¹³ CFUs per gram, between about 10¹⁰ and 10¹³ CFUs per gram, between about 10¹¹ and 10¹³ CFUs per gram, between about 10¹² and 10¹³ CFUs per gram, between about 10⁶ and 10¹² CFUs per gram, between about 10⁶ and 10¹¹ CFUs per gram, between about 10⁶ and 10¹⁰CFUs per gram, between about 10⁶ and 10⁹ CFUs per gram, between about 10⁶ and 10⁸ CFUs per gram, and between about 10⁶ and 10⁷ CFUs per gram. Preferably, the bacteria in the antifungal composition are at a concentration of at least 10⁹ CFUs per gram. In some embodiments, the bacteria are at a concentration of about 10⁹ to 10¹¹ CFUs per gram. Bacillus counts can be obtained, for example, on Trypticase soy agar.

[0055] In some embodiments, the antifungal composition can further include a water-soluble diluent. Non-limiting examples of water-soluble diluents include dextrose, maltodextrin, sucrose, sodium succinate, potassium succinate, fructose, mannose, lactose, maltose, dextrin, sorbitol, xylitol, inulin, trehalose, starch, cellobiose, carboxy methyl cellulose, dendritic salt, sodium sulfate, potassium sulfate, magnesium sulfate, sodium chloride, potassium chloride, calcium chloride, magnesium chloride, and a combination thereof. In some embodiments, the water-soluble diluent is dextrose monohydrate or anhydrous dextrose.

[0056] The antifungal composition can include at least 80% of a water-soluble diluent by weight. For example, the antifungal composition can include at least 80%, 85%, 90%, 91%, 92%, 93%, 94%, 95%, 96%, 97%, 98%, or 99% of the water-soluble diluent by weight.

[0057] The bacteria in the antifungal composition can be produced using any standard fermentation process known in the art, such as solid substrate or submerged liquid fermentation. The fermented cultures can be mixed cultures, microbiotic composites, or single isolates.

[0058] After fermentation, the bacteria are harvested by any known methods in the art. For example, the bacteria are harvested by filtration or centrifugation, or simply supplied as the ferment. The bacteria can be dried by any method known in the art. For example, the bacteria can be dried by liquid nitrogen followed by lyophilization. The compositions according to the present disclosure are freeze dried to moisture content less than 20%, 15%, 10%, 9%, 8%, 7%, 6%, 5%, 4%, 3%, 2%, or 1% by weight. Preferably, the compositions according to the invention have been freeze dried to moisture content less than 5% by weight. In some embodiments, the freeze-dried powder is ground to decrease the particle size. The bacteria can be ground by conical grinding at a temperature less than 10° C., 9° C., 8° C., 7° C., 6° C., 5° C., 4° C., 3° C., 2° C., 1° C., or 0° C. Preferably, the temperature is less than 4° C. For example, the particle size is less than 1500, 1400, 1300, 1200, 1100, 1000, 900, 800, 700, 600, 500, 400, 300, 200, or 100 microns. Preferably, the freeze-dried powder is ground to decrease the particle size such that the particle size is less than 800 microns. Most preferred are particle sizes less than about 400 microns. In most preferred embodiments, the dried powder has a mean particle size of 200 microns, with 60% of the mixture in the size range between 100-800 microns. The particle size can be measured using sieving according to ANSI/ASAE S319.4 method.

[0059] One aspect of the present disclosure relates to a method of treating or preventing Black Sigatoka in a banana plant, the method comprising contacting the banana plant with the antifungal compositions disclosed herein. Black Sigatoka is a severe foliar disease of banana (Musa spp.) caused by the plant-pathogenic fungus Mycosphaerella fijiensis. The appearance of disease symptoms on leaves is dynamic: lesions undergo changes in size, shape, and color as they expand and age.

[0060] In some embodiments, the method can reduce the severity of Black Sigatoka by at least 10% as compared to a control plant absent any treatment. In some embodiments, the method can reduce the severity of Black Sigatoka by at least 20% as compared to a control plant absent any treatment. In some embodiments, the method can reduce the severity of Black Sigatoka by at least 30% as compared to a control plant absent any treatment. In some embodiments, the method can reduce the severity of Black Sigatoka by at least 40% as compared to a control plant absent any treatment. In some embodiments, the method can reduce the severity of Black Sigatoka by at least 50% as compared to a control plant absent any treatment. In some embodiments, the method can reduce the severity of Black Sigatoka by at least 60% as compared to a control plant absent any treatment. In some embodiments, the method can reduce the severity of Black Sigatoka by at least 70% as compared to a control plant absent any treatment. In some embodiments, the method can reduce the severity of Black Sigatoka by at least 80% as compared to a control plant absent any treatment. In some embodiments, the method can reduce the severity of Black Sigatoka by at least 90% as compared to a control plant absent any treatment.

[0061] One aspect of the present disclosure relates to a method of treating or preventing Fusarium wilt (Panama Disease) in a plant, the method comprising contacting the plant with the antifungal compositions disclosed herein. Fusarium wilt is a common vascular wilt fungal disease, exhibiting symptoms similar to Verticillium wilt. The pathogen that causes Fusarium wilt is Fusarium oxysporum (F. oxysporum). Examples of plants include, but are not limited to, tomato, tobacco, legumes, cucurbits, sweet potatoes, mangos, Papayas, pineapple, coffee, spinach, and banana.

[0062] In some embodiments, the method can reduce the severity of Fusarium wilt by at least 10% as compared to a control plant absent any treatment. In some embodiments, the method can reduce the severity of Fusarium wilt by at least 20% as compared to a control plant absent any treatment. In some embodiments, the method can reduce the severity of Fusarium wilt by at least 30% as compared to a control plant absent any treatment. In some embodiments, the method can reduce the severity of Fusarium wilt by at least 40% as compared to a control plant absent any treatment. In some embodiments, the method can reduce the severity of Fusarium wilt by at least 50% as compared to a control plant absent any treatment. In some embodiments, the method can reduce the severity of Fusarium wilt by at least 60% as compared to a control plant absent any treatment. In some embodiments, the method can reduce the severity of Fusarium wilt by at least 70% as compared to a control plant absent any treatment. In some embodiments, the method can reduce the severity of Fusarium wilt by at least 80% as compared to a control plant absent any treatment. In some embodiments, the method can reduce the severity of Fusarium wilt by at least 90% as compared to a control plant absent any treatment.

[0063] One aspect of the present disclosure relates to a method of treating or preventing anthracnose in a plant, the method comprising contacting the plant with the antifungal compositions disclosed herein. In some embodiments, the anthracnose is caused by Colletotrichum sp. Anthracnose is a common disease that attacks a wide range of plants and trees. Examples of plants include, but are not limited to, tomato, mango, Aloe, turfgrass, ash, birch, walnut, buckeye, elm, hornbeam, maple, oak, sycamore, Catalpa, dogwood, hickory, linden, and poplar.

[0064] In some embodiments, the method can reduce the severity of anthracnose by at least 10% as compared to a control plant absent any treatment. In some embodiments, the method can reduce the severity of anthracnose by at least 20% as compared to a control plant absent any treatment. In some embodiments, the method can reduce the severity of anthracnose by at least 30% as compared to a control plant absent any treatment. In some embodiments, the method can reduce the severity of anthracnose by at least 40% as compared to a control plant absent any treatment. In some embodiments, the method can reduce the severity of anthracnose by at least 50% as compared to a control plant absent any treatment. In some embodiments, the method can reduce the severity of anthracnose by at least 60% as compared to a control plant absent any treatment. In some embodiments, the method can reduce the severity of anthracnose by at least 70% as compared to a control plant absent any treatment. In some embodiments, the method can reduce the severity of anthracnose by at least 80% as compared to a control plant absent any treatment. In some embodiments, the method can reduce the severity of anthracnose by at least 90% as compared to a control plant absent any treatment.

[0065] One aspect of the present disclosure relates to a method of treating or preventing ghost spot in a plant, the method comprising contacting the plant with the antifungal compositions disclosed herein. Ghost spot is a fungal disease of older leaves. In some embodiments, the ghost spot is caused by Cladosporium colocasiae. Examples of plants include, but are not limited to, tomato and taro.

[0066] In some embodiments, the method can reduce the severity of ghost spot by at least 10% as compared to a control plant absent any treatment. In some embodiments, the method can reduce the severity of ghost spot by at least 20% as compared to a control plant absent any treatment. In some embodiments, the method can reduce the severity of ghost spot by at least 30% as compared to a control plant absent any treatment. In some embodiments, the method can reduce the severity of ghost spot by at least 40% as compared to a control plant absent any treatment. In some embodiments, the method can reduce the severity of ghost spot by at least 50% as compared to a control plant absent any treatment. In some embodiments, the method can reduce the severity of ghost spot by at least 60% as compared to a control plant absent any treatment. In some embodiments, the method can reduce the severity of ghost spot by at least 70% as compared to a control plant absent any treatment. In some embodiments, the method can reduce the severity of ghost spot by at least 80% as compared to a control plant absent any treatment. In some embodiments, the method can reduce the severity of ghost spot by at least 90% as compared to a control plant absent any treatment.

[0067] One aspect of the present disclosure relates to a method of treating or preventing a leaf spot disease in a plant, the method comprising contacting the plant with the antifungal compositions disclosed herein. Leaf spots are round blemishes found on the leaves of many species of plants, mostly caused by parasitic fungi or bacteria. In some embodiments, the leaf spot disease is caused by Pseudocercospora ocimibasilici. Examples of plants include, but are not limited to, maple, tomato, turfgrass, ash, birch, walnut, buckeye, elm, hornbeam, oak, sycamore, Catalpa, dogwood, hickory, linden, mango, Papaya, and poplar.

[0068] In some embodiments, the method can reduce the severity of a leaf spot disease by at least 10% as compared to a control plant absent any treatment. In some embodiments, the method can reduce the severity of a leaf spot disease by at least 20% as compared to a control plant absent any treatment. In some embodiments, the method can reduce the severity of a leaf spot disease by at least 30% as compared to a control plant absent any treatment. In some embodiments, the method can reduce the severity of a leaf spot disease by at least 40% as compared to a control plant absent any treatment. In some embodiments, the method can reduce the severity of a leaf spot disease by at least 50% as compared to a control plant absent any treatment. In some embodiments, the method can reduce the severity of a leaf spot disease by at least 60% as compared to a control plant absent any treatment. In some embodiments, the method can reduce the severity of a leaf spot disease by at least 70% as compared to a control plant absent any treatment. In some embodiments, the method can reduce the severity of a leaf spot disease by at least 80% as compared to a control plant absent any treatment. In some embodiments, the method can reduce the severity of a leaf spot disease by at least 90% as compared to a control plant absent any treatment.

[0069] One aspect of the present disclosure relates to a method of treating or preventing crown rot in a plant, the method comprising contacting the plant with the antifungal compositions disclosed herein. Crown rot is caused by several soil-borne fungi. In some embodiments, the crown rot is caused by Colletotrichum musae, Chalara paradoxa, Fusarium pseudograminearum, Macrophomina phaseolina, or a combination thereof. Examples of plants include, but are not limited to, wheat, an apple tree, a cherry tree, a peach tree, banana, strawberry, and pineapple.

[0070] In some embodiments, the method can reduce the severity of crown rot by at least 10% as compared to a control plant absent any treatment. In some embodiments, the method can reduce the severity of crown rot by at least 20% as compared to a control plant absent any treatment. In some embodiments, the method can reduce the severity of crown rot by at least 30% as compared to a control plant absent any treatment. In some embodiments, the method can reduce the severity of crown rot by at least 40% as compared to a control plant absent any treatment. In some embodiments, the method can reduce the severity of crown rot by at least 50% as compared to a control plant absent any treatment. In some embodiments, the method can reduce the severity of crown rot by at least 60% as compared to a control plant absent any treatment. In some embodiments, the method can reduce the severity of crown rot by at least 70% as compared to a control plant absent any treatment. In some embodiments, the method can reduce the severity of crown rot by at least 80% as compared to a control plant absent any treatment. In some embodiments, the method can reduce the severity of crown rot by at least 90% as compared to a control plant absent any treatment.

[0071] One aspect of the present disclosure relates to a method of treating or preventing stem blight in a plant, the method comprising contacting the plant with the antifungal compositions disclosed herein. In some embodiments, the stem blight is caused by Botrytis cinerea or Didymella bryoniae. Examples of plants include, but are not limited to, strawberries, fig, peach, and grapes.

[0072] In some embodiments, the method can reduce the severity of stem blight by at least 10% as compared to a control plant absent any treatment. In some embodiments, the method can reduce the severity of stem blight by at least 20% as compared to a control plant absent any treatment. In some embodiments, the method can reduce the severity of stem blight by at least 30% as compared to a control plant absent any treatment. In some embodiments, the method can reduce the severity of stem blight by at least 40% as compared to a control plant absent any treatment. In some embodiments, the method can reduce the severity of stem blight by at least 50% as compared to a control plant absent any treatment. In some embodiments, the method can reduce the severity of stem blight by at least 60% as compared to a control plant absent any treatment. In some embodiments, the method can reduce the severity of stem blight by at least 70% as compared to a control plant absent any treatment. In some embodiments, the method can reduce the severity of stem blight by at least 80% as compared to a control plant absent any treatment. In some embodiments, the method can reduce the severity of stem blight by at least 90% as compared to a control plant absent any treatment.

[0073] One aspect of the present disclosure relates to a method of treating or preventing citrus mold in a plant, the method comprising contacting the plant with the antifungal compositions disclosed herein. In some embodiments, the citrus mold is caused by a Penicillium species such as Penicillium digitatum. Examples of plants include, but are not limited to, orange, grapefruit, tangerine, lemon, and lime.

[0074] In some embodiments, the method can reduce the severity of citrus mold by at least 10% as compared to a control plant absent any treatment. In some embodiments, the method can reduce the severity of citrus mold by at least 20% as compared to a control plant absent any treatment. In some embodiments, the method can reduce the severity of citrus mold by at least 30% as compared to a control plant absent any treatment. In some embodiments, the method can reduce the severity of citrus mold by at least 40% as compared to a control plant absent any treatment. In some embodiments, the method can reduce the severity of citrus mold by at least 50% as compared to a control plant absent any treatment. In some embodiments, the method can reduce the severity of citrus mold by at least 60% as compared to a control plant absent any treatment. In some embodiments, the method can reduce the severity of citrus mold by at least 70% as compared to a control plant absent any treatment. In some embodiments, the method can reduce the severity of citrus mold by at least 80% as compared to a control plant absent any treatment. In some embodiments, the method can reduce the severity of citrus mold by at least 90% as compared to a control plant absent any treatment.

[0075] One aspect of the present disclosure relates to a method of treating or preventing leaf blight in a plant, the method comprising contacting the plant with the antifungal compositions disclosed herein. In some embodiments, the leaf blight is caused by a Curvularia species, a Nigrospora species, a Phytophthora species, a Fusarium species, or a combination thereof. Examples of plants include, but are not limited to, turfgrass, taro, strawberry, almond, cherry, plum, apricot, and peach.

[0076] In some embodiments, the method can reduce the severity of leaf blight by at least 10% as compared to a control plant absent any treatment. In some embodiments, the method can reduce the severity of leaf blight by at least 20% as compared to a control plant absent any treatment. In some embodiments, the method can reduce the severity of leaf blight by at least 30% as compared to a control plant absent any treatment. In some embodiments, the method can reduce the severity of leaf blight by at least 40% as compared to a control plant absent any treatment. In some embodiments, the method can reduce the severity of leaf blight by at least 50% as compared to a control plant absent any treatment. In some embodiments, the method can reduce the severity of leaf blight by at least 60% as compared to a control plant absent any treatment. In some embodiments, the method can reduce the severity of leaf blight by at least 70% as compared to a control plant absent any treatment. In some embodiments, the method can reduce the severity of leaf blight by at least 80% as compared to a control plant absent any treatment. In some embodiments, the method can reduce the severity of leaf blight by at least 90% as compared to a control plant absent any treatment.

[0077] One aspect of the present disclosure relates to a method of treating or preventing fruit rot in a plant, the method comprising contacting the plant with the antifungal compositions disclosed herein. In some embodiments, the fruit rot is caused by a Mucor species such as Mucor piriformis. Examples of plants include, but are not limited to, tomatoes, potatoes, peppers, a fruit tree (e.g., apple or pear tree), and an ornamental plant.

[0078] In some embodiments, the method can reduce the severity of fruit rot by at least 10% as compared to a control plant absent any treatment. In some embodiments, the method can reduce the severity of fruit rot by at least 20% as compared to a control plant absent any treatment. In some embodiments, the method can reduce the severity of fruit rot by at least 30% as compared to a control plant absent any treatment. In some embodiments, the method can reduce the severity of fruit rot by at least 40% as compared to a control plant absent any treatment. In some embodiments, the method can reduce the severity of fruit rot by at least 50% as compared to a control plant absent any treatment. In some embodiments, the method can reduce the severity of fruit rot by at least 60% as compared to a control plant absent any treatment. In some embodiments, the method can reduce the severity of fruit rot by at least 70% as compared to a control plant absent any treatment. In some embodiments, the method can reduce the severity of fruit rot by at least 80% as compared to a control plant absent any treatment. In some embodiments, the method can reduce the severity of fruit rot by at least 90% as compared to a control plant absent any treatment.

[0079] One aspect of the present disclosure relates to a method of treating or preventing brown rot in a plant, the method comprising contacting the plant with the antifungal compositions disclosed herein. Brown rot is a fungal disease that commonly affects stone-fruit trees like peaches and cherries. In some embodiments, the brown rot is caused by Monilinia fructicola. Examples of plants include, but are not limited to, a peach tree, an apricot tree, a plum tree, a nectarine tree, and cherries.

[0080] In some embodiments, the method can reduce the severity of brown rot by at least 10% as compared to a control plant absent any treatment. In some embodiments, the method can reduce the severity of brown rot by at least 20% as compared to a control plant absent any treatment. In some embodiments, the method can reduce the severity of brown rot by at least 30% as compared to a control plant absent any treatment. In some embodiments, the method can reduce the severity of brown rot by at least 40% as compared to a control plant absent any treatment. In some embodiments, the method can reduce the severity of brown rot by at least 50% as compared to a control plant absent any treatment. In some embodiments, the method can reduce the severity of brown rot by at least 60% as compared to a control plant absent any treatment. In some embodiments, the method can reduce the severity of brown rot by at least 70% as compared to a control plant absent any treatment. In some embodiments, the method can reduce the severity of brown rot by at least 80% as compared to a control plant absent any treatment. In some embodiments, the method can reduce the severity of brown rot by at least 90% as compared to a control plant absent any treatment.

[0081] One aspect of the present disclosure relates to a method of treating or preventing black rot in a plant, the method comprising contacting the plant with the antifungal compositions disclosed herein. Black rot is a name used for various diseases of cultivated plants caused by fungi or bacteria, producing dark brown discoloration and decay in the leaves of fruit and vegetables: (a) a disease of the apple, pear and quince caused by a fungus (Botryosphaeria obtusa or Physalospora cydoniae); (b) a disease of the apple, pear and quince caused by a fungus (Botryosphaeria obtusa or Physalospora cydoniae); (c) a disease of cabbage and related plants caused by a bacterium (Xanthomonas campestris pv. campestris); (d) a disease of the potato caused by a bacterium (Erwinia atroseptica); (e) a disease of citrus plants caused by a fungus (Alternaria citri); and (f) a disease of the sweet potato caused by a fungus (Ceratostomella fimbriata). In some embodiments, the black rot is caused by Xanthomonas campestris, Xanothomonas campestris pv. Campestris, Guignardia bidwellii, or a combination thereof. Examples of plants include, but are not limited to, cyclamen, poinsettia, Primula, Impatiens, Begonia, Nicotiana, geranium, and sweet peas.

[0082] In some embodiments, the method can reduce the severity of black rot by at least 10% as compared to a control plant absent any treatment. In some embodiments, the method can reduce the severity of black rot by at least 20% as compared to a control plant absent any treatment. In some embodiments, the method can reduce the severity of black rot by at least 30% as compared to a control plant absent any treatment. In some embodiments, the method can reduce the severity of black rot by at least 40% as compared to a control plant absent any treatment. In some embodiments, the method can reduce the severity of black rot by at least 50% as compared to a control plant absent any treatment. In some embodiments, the method can reduce the severity of black rot by at least 60% as compared to a control plant absent any treatment. In some embodiments, the method can reduce the severity of black rot by at least 70% as compared to a control plant absent any treatment. In some embodiments, the method can reduce the severity of black rot by at least 80% as compared to a control plant absent any treatment. In some embodiments, the method can reduce the severity of black rot by at least 90% as compared to a control plant absent any treatment.

[0083] One aspect of the present disclosure relates to a method of treating or preventing gray mold in a plant, the method comprising contacting the plant with the antifungal compositions disclosed herein. In some embodiments, the gray mold is caused by a Botrytis species such as Botrytis cinerea. Examples of plants include, but are not limited to, a grape plant, strawberry, peach, artichoke, asparagus, bean, beet, blackberry, and black-eyed pea.

[0084] In some embodiments, the method can reduce the severity of gray mold by at least 10% as compared to a control plant absent any treatment. In some embodiments, the method can reduce the severity of gray mold by at least 20% as compared to a control plant absent any treatment. In some embodiments, the method can reduce the severity of gray mold by at least 30% as compared to a control plant absent any treatment. In some embodiments, the method can reduce the severity of gray mold by at least 40% as compared to a control plant absent any treatment. In some embodiments, the method can reduce the severity of gray mold by at least 50% as compared to a control plant absent any treatment. In some embodiments, the method can reduce the severity of gray mold by at least 60% as compared to a control plant absent any treatment. In some embodiments, the method can reduce the severity of gray mold by at least 70% as compared to a control plant absent any treatment. In some embodiments, the method can reduce the severity of gray mold by at least 80% as compared to a control plant absent any treatment. In some embodiments, the method can reduce the severity of gray mold by at least 90% as compared to a control plant absent any treatment.

[0085] One aspect of the present disclosure relates to a method of treating or preventing black mold in a plant, the method comprising contacting the plant with the antifungal compositions disclosed herein. Black mold symptoms vary from small, superficial, brown flecks to large, sunken, black lesions. In some embodiments, the black mold is caused by Alternaria solani, a Stemphyllium species, or a combination thereof. Examples of plants include, but are not limited to, a grape plant, tomato, and an ornamental plant.

[0086] In some embodiments, the method can reduce the severity of black mold by at least 10% as compared to a control plant absent any treatment. In some embodiments, the method can reduce the severity of black mold by at least 20% as compared to a control plant absent any treatment. In some embodiments, the method can reduce the severity of black mold by at least 30% as compared to a control plant absent any treatment. In some embodiments, the method can reduce the severity of black mold by at least 40% as compared to a control plant absent any treatment. In some embodiments, the method can reduce the severity of black mold by at least 50% as compared to a control plant absent any treatment. In some embodiments, the method can reduce the severity of black mold by at least 60% as compared to a control plant absent any treatment. In some embodiments, the method can reduce the severity of black mold by at least 70% as compared to a control plant absent any treatment. In some embodiments, the method can reduce the severity of black mold by at least 80% as compared to a control plant absent any treatment. In some embodiments, the method can reduce the severity of black mold by at least 90% as compared to a control plant absent any treatment.

[0087] One aspect of the present disclosure relates to a method of treating or preventing cigar-end rot in a plant, the method comprising contacting the plant with the antifungal compositions disclosed herein. In some embodiments, the cigar-end rot is caused by a Pestalotia species, Verticillium theobromas, Trachysphaera fructigena, or a combination thereof. Examples of plants include, but are not limited to, a banana plant, Liberian coffee tree, an avocado tree, and cocoa tree.

[0088] In some embodiments, the method can reduce the severity of cigar-end rot by at least 10% as compared to a control plant absent any treatment. In some embodiments, the method can reduce the severity of cigar-end rot by at least 20% as compared to a control plant absent any treatment. In some embodiments, the method can reduce the severity of cigar-end rot by at least 30% as compared to a control plant absent any treatment. In some embodiments, the method can reduce the severity of cigar-end rot by at least 40% as compared to a control plant absent any treatment. In some embodiments, the method can reduce the severity of cigar-end rot by at least 50% as compared to a control plant absent any treatment. In some embodiments, the method can reduce the severity of cigar-end rot by at least 60% as compared to a control plant absent any treatment. In some embodiments, the method can reduce the severity of cigar-end rot by at least 70% as compared to a control plant absent any treatment. In some embodiments, the method can reduce the severity of cigar-end rot by at least 80% as compared to a control plant absent any treatment. In some embodiments, the method can reduce the severity of cigar-end rot by at least 90% as compared to a control plant absent any treatment.

[0089] One aspect of the present disclosure relates to a method of treating or preventing blight caused by Xanthomonas axonopodis pv. dieffenbachiae in a plant, the method comprising contacting the plant with the antifungal compositions disclosed herein. Examples of plants include, but are not limited to, orange, pineapple, and lime.

[0090] In some embodiments, the method can reduce the severity of blight caused by Xanthomonas axonopodis pv. dieffenbachiae by at least 10% as compared to a control plant absent any treatment. In some embodiments, the method can reduce the severity of blight caused by Xanthomonas axonopodis pv. dieffenbachiae by at least 20% as compared to a control plant absent any treatment. In some embodiments, the method can reduce the severity of blight caused by Xanthomonas axonopodis pv. dieffenbachiae by at least 30% as compared to a control plant absent any treatment. In some embodiments, the method can reduce the severity of blight caused by Xanthomonas axonopodis pv. dieffenbachiae by at least 40% as compared to a control plant absent any treatment. In some embodiments, the method can reduce the severity of blight caused by Xanthomonas axonopodis pv. dieffenbachiae by at least 50% as compared to a control plant absent any treatment. In some embodiments, the method can reduce the severity of blight caused by Xanthomonas axonopodis pv. dieffenbachiae by at least 60% as compared to a control plant absent any treatment. In some embodiments, the method can reduce the severity of blight caused by Xanthomonas axonopodis pv. dieffenbachiae by at least 70% as compared to a control plant absent any treatment. In some embodiments, the method can reduce the severity of blight caused by Xanthomonas axonopodis pv. dieffenbachiae by at least 80% as compared to a control plant absent any treatment. In some embodiments, the method can reduce the severity of blight caused by Xanthomonas axonopodis pv. dieffenbachiae by at least 90% as compared to a control plant absent any treatment.

[0091] One aspect of the present disclosure relates to a method of treating or preventing decay caused by an Acidovorax species in a plant, the method comprising contacting the plant with the antifungal compositions disclosed herein. In some embodiments, the plant is watermelon.

[0092] In some embodiments, the method can reduce the severity of decay caused by an Acidovorax species by at least 10% as compared to a control plant absent any treatment. In some embodiments, the method can reduce the severity of decay caused by an Acidovorax species by at least 20% as compared to a control plant absent any treatment. In some embodiments, the method can reduce the severity of decay caused by an Acidovorax species by at least 30% as compared to a control plant absent any treatment. In some embodiments, the method can reduce the severity of decay caused by an Acidovorax species by at least 40% as compared to a control plant absent any treatment. In some embodiments, the method can reduce the severity of decay caused by an Acidovorax species by at least 50% as compared to a control plant absent any treatment. In some embodiments, the method can reduce the severity of decay caused by an Acidovorax species by at least 60% as compared to a control plant absent any treatment. In some embodiments, the method can reduce the severity of decay caused by an Acidovorax species by at least 70% as compared to a control plant absent any treatment. In some embodiments, the method can reduce the severity of decay caused by an Acidovorax species by at least 80% as compared to a control plant absent any treatment. In some embodiments, the method can reduce the severity of decay caused by an Acidovorax species by at least 90% as compared to a control plant absent any treatment.

[0093] One aspect of the present disclosure relates to a method of treating or preventing late blight in a plant, the method comprising contacting the plant with the antifungal compositions disclosed herein. In some embodiments, the late blight is caused by a Phytophthora infestans, Phytophthora colocasiae, or combinations thereof. Examples of plants include, but are not limited to, tomatoes, potatoes, and taro.

[0094] In some embodiments, the method can reduce the severity of late blight caused by Phytophthora infestans by at least 10% as compared to a control plant absent any treatment. In some embodiments, the method can reduce the severity of late blight caused by Phytophthora infestans by at least 20% as compared to a control plant absent any treatment. In some embodiments, the method can reduce the severity of late blight caused by Phytophthora infestans by at least 30% as compared to a control plant absent any treatment. In some embodiments, the method can reduce the severity of late blight caused by Phytophthora infestans by at least 40% as compared to a control plant absent any treatment. In some embodiments, the method can reduce the severity of late blight caused by Phytophthora infestans by at least 50% as compared to a control plant absent any treatment. In some embodiments, the method can reduce the severity of late blight caused by Phytophthora infestans by at least 60% as compared to a control plant absent any treatment. In some embodiments, the method can reduce the severity of late blight caused by Phytophthora infestans by at least 70% as compared to a control plant absent any treatment. In some embodiments, the method can reduce the severity of late blight caused by Phytophthora infestans by at least 80% as compared to a control plant absent any treatment. In some embodiments, the method can reduce the severity of late blight caused by Phytophthora infestans by at least 90% as compared to a control plant absent any treatment.

[0095] One aspect of the present disclosure relates to a method of treating or preventing Cercospora leaf spot in a plant, the method comprising contacting the plant with the antifungal compositions disclosed herein. In some embodiments, the Cercospora leaf spot is caused by Cercospora ipomoea. Examples of plants include, but are not limited to, beach morning glory. In some embodiments, the method can reduce the severity of Cercospora leaf spot caused by Cercospora ipomoea by at least 10% as compared to a control plant absent any treatment. In some embodiments, the method can reduce the severity of Cercospora leaf spot caused by Cercospora ipomoea by at least 20% as compared to a control plant absent any treatment. In some embodiments, the method can reduce the severity of Cercospora leaf spot caused by Cercospora ipomoea by at least 30% as compared to a control plant absent any treatment. In some embodiments, the method can reduce the severity of Cercospora leaf spot caused by Cercospora ipomoea by at least 40% as compared to a control plant absent any treatment. In some embodiments, the method can reduce the severity of Cercospora leaf spot caused by Cercospora ipomoea by at least 50% as compared to a control plant absent any treatment. In some embodiments, the method can reduce the severity of Cercospora leaf spot caused by Cercospora ipomoea by at least 60% as compared to a control plant absent any treatment. In some embodiments, the method can reduce the severity of Cercospora leaf spot caused by Cercospora ipomoea by at least 70% as compared to a control plant absent any treatment. In some embodiments, the method can reduce the severity of Cercospora leaf spot caused by Cercospora ipomoea by at least 80% as compared to a control plant absent any treatment. In some embodiments, the method can reduce the severity of Cercospora leaf spot caused by Cercospora ipomoea by at least 90% as compared to a control plant absent any treatment.

[0096] One aspect of the present disclosure relates to a method of treating or preventing branch canker and dieback in a plant, the method comprising contacting the plant with the antifungal compositions disclosed herein. In some embodiments, the branch canker and dieback is caused by Phoma sp. The antifungal compositions can inhibit or reduce the reproduction of Phoma sp. Examples of plants include, but are not limited to, milo.

[0097] In some embodiments, the method can reduce the severity of branch canker and dieback caused by Phoma species by at least 10% as compared to a control plant absent any treatment. In some embodiments, the method can reduce the severity of branch canker and dieback caused by Phoma species by at least 20% as compared to a control plant absent any treatment. In some embodiments, the method can reduce the severity of branch canker and dieback caused by Phoma species by at least 30% as compared to a control plant absent any treatment. In some embodiments, the method can reduce the severity of branch canker and dieback caused by Phoma species by at least 40% as compared to a control plant absent any treatment. In some embodiments, the method can reduce the severity of branch canker and dieback caused by Phoma species by at least 50% as compared to a control plant absent any treatment. In some embodiments, the method can reduce the severity of branch canker and dieback caused by Phoma species by at least 60% as compared to a control plant absent any treatment. In some embodiments, the method can reduce the severity of branch canker and dieback caused by Phoma species by at least 70% as compared to a control plant absent any treatment. In some embodiments, the method can reduce the severity of branch canker and dieback caused by Phoma species by at least 80% as compared to a control plant absent any treatment. In some embodiments, the method can reduce the severity of branch canker and dieback caused by Phoma species by at least 90% as compared to a control plant absent any treatment.

[0098] One aspect of the present disclosure relates to a method of treating or preventing Verticillium wilt in a plant, the method comprising contacting the plant with the antifungal compositions disclosed herein. In some embodiments, the Verticillium wilt is caused by Verticillium dahliae. Examples of plants include, but are not limited to, strawberry.

[0099] In some embodiments, the method can reduce the severity of Verticillium wilt caused by Verticillium species by at least 10% as compared to a control plant absent any treatment. In some embodiments, the method can reduce the severity of Verticillium wilt caused by Verticillium species by at least 20% as compared to a control plant absent any treatment. In some embodiments, the method can reduce the severity of Verticillium wilt caused by Verticillium species by at least 30% as compared to a control plant absent any treatment. In some embodiments, the method can reduce the severity of Verticillium wilt caused by Verticillium species by at least 40% as compared to a control plant absent any treatment. In some embodiments, the method can reduce the severity of Verticillium wilt caused by Verticillium species by at least 50% as compared to a control plant absent any treatment. In some embodiments, the method can reduce the severity of Verticillium wilt caused by Verticillium species by at least 60% as compared to a control plant absent any treatment. In some embodiments, the method can reduce the severity of Verticillium wilt caused by Verticillium species by at least 70% as compared to a control plant absent any treatment. In some embodiments, the method can reduce the severity of Verticillium wilt caused by Verticillium species by at least 80% as compared to a control plant absent any treatment. In some embodiments, the method can reduce the severity of Verticillium wilt caused by Verticillium species by at least 90% as compared to a control plant absent any treatment.

[0100] One aspect of the present disclosure relates to a method of treating or preventing pineapple black rot in a plant, the method comprising contacting the plant with the antifungal compositions disclosed herein. In some embodiments, the pineapple black rot is caused by Chalara paradoxa, Ceratocystic paradoxa, Theilaviopsis paradoxa, or combinations thereof. Examples of plants include, but are not limited to, pineapple.

[0101] In some embodiments, the method can reduce the severity of pineapple black rot caused by Chalara species by at least 10% as compared to a control plant absent any treatment. In some embodiments, the method can reduce the severity of pineapple black rot caused by Chalara species by at least 20% as compared to a control plant absent any treatment. In some embodiments, the method can reduce the severity of pineapple black rot caused by Chalara species by at least 30% as compared to a control plant absent any treatment. In some embodiments, the method can reduce the severity of pineapple black rot caused by Chalara species by at least 40% as compared to a control plant absent any treatment. In some embodiments, the method can reduce the severity of pineapple black rot caused by Chalara species by at least 50% as compared to a control plant absent any treatment. In some embodiments, the method can reduce the severity of pineapple black rot caused by Chalara species by at least 60% as compared to a control plant absent any treatment. In some embodiments, the method can reduce the severity of pineapple black rot caused by Chalara species by at least 70% as compared to a control plant absent any treatment. In some embodiments, the method can reduce the severity of pineapple black rot caused by Chalara species by at least 80% as compared to a control plant absent any treatment. In some embodiments, the method can reduce the severity of pineapple black rot caused by Chalara species by at least 90% as compared to a control plant absent any treatment.

[0102] In some embodiments, the method can reduce the severity of pineapple black rot caused by Ceratocystic species by at least 10% as compared to a control plant absent any treatment. In some embodiments, the method can reduce the severity of pineapple black rot caused by Ceratocystic species by at least 20% as compared to a control plant absent any treatment. In some embodiments, the method can reduce the severity of pineapple black rot caused by Ceratocystic species by at least 30% as compared to a control plant absent any treatment. In some embodiments, the method can reduce the severity of pineapple black rot caused by Ceratocystic species by at least 40% as compared to a control plant absent any treatment. In some embodiments, the method can reduce the severity of pineapple black rot caused by Ceratocystic species by at least 50% as compared to a control plant absent any treatment. In some embodiments, the method can reduce the severity of pineapple black rot caused by Ceratocystic species by at least 60% as compared to a control plant absent any treatment. In some embodiments, the method can reduce the severity of pineapple black rot caused by Ceratocystic species by at least 70% as compared to a control plant absent any treatment. In some embodiments, the method can reduce the severity of pineapple black rot caused by Ceratocystic species by at least 80% as compared to a control plant absent any treatment. In some embodiments, the method can reduce the severity of pineapple black rot caused by Ceratocystic species by at least 90% as compared to a control plant absent any treatment.

[0103] In some embodiments, the method can reduce the severity of pineapple black rot caused by Theilaviopsis species by at least 10% as compared to a control plant absent any treatment. In some embodiments, the method can reduce the severity of pineapple black rot caused by Theilaviopsis species by at least 20% as compared to a control plant absent any treatment. In some embodiments, the method can reduce the severity of pineapple black rot caused by Theilaviopsis species by at least 30% as compared to a control plant absent any treatment. In some embodiments, the method can reduce the severity of pineapple black rot caused by Theilaviopsis species by at least 40% as compared to a control plant absent any treatment. In some embodiments, the method can reduce the severity of pineapple black rot caused by Theilaviopsis species by at least 50% as compared to a control plant absent any treatment. In some embodiments, the method can reduce the severity of pineapple black rot caused by Theilaviopsis species by at least 60% as compared to a control plant absent any treatment. In some embodiments, the method can reduce the severity of pineapple black rot caused by Theilaviopsis species by at least 70% as compared to a control plant absent any treatment. In some embodiments, the method can reduce the severity of pineapple black rot caused by Theilaviopsis species by at least 80% as compared to a control plant absent any treatment. In some embodiments, the method can reduce the severity of pineapple black rot caused by Theilaviopsis species by at least 90% as compared to a control plant absent any treatment. Novel approaches to managing soil-borne diseases of strawberry are in need due to the phase-out and increased regulation of commonly used soil fumigants such as methyl bromide and chloropicrin. Accordingly, one aspect of the present disclosure relates to a method of treating or preventing a soil-borne disease in strawberries, the method comprising contacting the plant with the antifungal compositions disclosed herein. The soil-borne disease can be caused by Botrytis cinerea, Fusarium oxysporum f. sp. fragariae, Macrophomina phaseolina, Verticillium dahliae, and a combination thereof.

[0104] In some embodiments, the method can reduce the severity of the soil-borne disease in strawberries by at least 10% as compared to a control plant absent any treatment. In some embodiments, the method can reduce the severity of the soil-borne disease in strawberries by at least 20% as compared to a control plant absent any treatment. In some embodiments, the method can reduce the severity of the soil-borne disease in strawberries by at least 30% as compared to a control plant absent any treatment. In some embodiments, the method can reduce the severity of the soil-borne disease in strawberries by at least 40% as compared to a control plant absent any treatment. In some embodiments, the method can reduce the severity of the soil-borne disease in strawberries by at least 50% as compared to a control plant absent any treatment. In some embodiments, the method can reduce the severity of the soil-borne disease in strawberries by at least 60% as compared to a control plant absent any treatment. In some embodiments, the method can reduce the severity of the soil-borne disease in strawberries by at least 70% as compared to a control plant absent any treatment. In some embodiments, the method can reduce the severity of the soil-borne disease in strawberries by at least 80% as compared to a control plant absent any treatment. In some embodiments, the method can reduce the severity of the soil-borne disease in strawberries by at least 90% as compared to a control plant absent any treatment.

[0105] The plant can be contacted with the antifungal composition by spraying the antifungal composition onto the plant.

[0106] In some embodiments of any one of the above aspects, the plant is contacted with the antifungal composition daily. The contacting can be done throughout the fruit growth cycle.

[0107] In some embodiments of any one of the above aspects, the plant is contacted with the antifungal composition once every few days, e.g., once per week. The contacting can be done throughout the fruit growth cycle.

[0108] In some embodiments of any one of the above aspects, the plant is contacted with the antifungal composition monthly. The contacting can be done throughout the fruit growth cycle.

[0109] The suspension that is used to contact the plant with can include about 0.1-10 grams of the dry antifungal composition per gallon of water. For example, the suspension can include about 0.5 gram, 1 gram, 1.5 grams, 2 grams, 2.5 grams, 3 grams, 3.5 grams, 4 grams, 4.5 grams, 5 grams, 5.5 grams, or 6 grams of the dry antifungal composition per gallon of water.

[0110] The antifungal composition of the present disclosure can be used in combination with one or more fungicides. Non-limiting examples of fungicides include mancozeb, maneb, fenbuconazole, propiconazole (Tilt), azoxystrobin, tebuconazole, methyl bromide, chloropicrin, and petroleum distillates.

[0111] The details of the invention are set forth in the accompanying description below. Although methods and materials similar or equivalent to those described herein can be used in the practice or testing of the present invention, illustrative methods and materials are now described. Other features, objects, and advantages of the invention will be apparent from the description and from the claims. In the specification and the appended claims, the singular forms also include the plural unless the context clearly dictates otherwise. Unless defined otherwise, all technical and scientific terms used herein have the same meaning as commonly understood by one of ordinary skill in the art to which this invention belongs. All patents and publications cited in this specification are incorporated herein by reference in their entireties.

### Definitions

[0112] The term “comprising” as used herein is synonymous with “including” or “containing” and is inclusive or open-ended and does not exclude additional, unrecited members, elements or method steps. By “consisting of” is meant including, and limited to, whatever follows the phrase “consisting of.” Thus, the phrase “consisting of” indicates that the listed elements are required or mandatory, and that no other elements may be present. By “consisting essentially of” is meant including any elements listed after the phrase and limited to other elements that do not interfere with or contribute to the activity or action specified in the disclosure for the listed elements. Thus, the phrase “consisting essentially of” indicates that the listed elements are required or mandatory, but that other elements are optional and may or may not be present depending upon whether or not they materially affect the activity or action of the listed elements. In some embodiments, the phrase “consisting essentially of” refers to a bacterial mixture having 5% or less (e.g., 5% or less, 4% or less, 3% or less, 2% or less, or 1% or less) by CFU of a bacterial species other than Bacillus subtilis 34 KLB and Bacillus amyloliquefaciens.

[0113] The articles “a” and “an” are used in this disclosure to refer to one or more than one (i.e., to at least one) of the grammatical object of the article. By way of example, “an element” means one element or more than one element.

[0114] The term “and/or” is used in this disclosure to mean either “and” or “or” unless indicated otherwise.

[0115] The term “treating”, as used herein, unless otherwise indicated, means reversing, alleviating, inhibiting the progress of, delaying the progression of, the disease or condition to which such term applies, or one or more symptoms of such disease or condition.

[0116] The term “preventing” refers to an inhibition or delay in the onset of at least one symptom of a disease or condition.

[0117] The term “severity” when used to describe a disease refers to the percentage of relevant host tissues or organ covered by symptoms or lesion or damaged by the disease. In some embodiments, standard area diagrams can be used to estimate disease severity by comparing the diseased leaves with the pictorial representation of the host plant with known and graded amounts of the same disease. For assessing the disease severity, the descriptive keys are standardized and/or given numerical ratings for the specific disease.

[0118] The term “about” means within ±10% of a given value or range.

### Examples

[0119] The disclosure is further illustrated by the following examples, which are not to be construed as limiting this disclosure in scope or spirit to the specific procedures herein described. It is to be understood that the examples are provided to illustrate certain embodiments and that no limitation to the scope of the disclosure is intended thereby. It is to be further understood that resort may be had to various other embodiments, modifications, and equivalents thereof which may suggest themselves to those skilled in the art without departing from the spirit of the present disclosure and/or scope of the appended claims.

### Example 1. Black Sigatoka Control in Hawaii

[0120] Most farmers in Black Sigatoka-prone regions of Hawaii use one or more fungicides to manage the disease. The most commonly used products, used alone, in rotations, or in combinations, include the active ingredients mancozeb, maneb, fenbuconazole, propiconazole (Tilt), azoxystrobin, tebuconazole, and petroleum distillates (oils). Petroleum distillates work very well in combination with sanitation (de-trashing). Growers often either mix or rotate fungicides with different modes of action, such as tank mixes of protectant type fungicides (e.g., mancozeb or manzate) with systemic fungicides (e.g., fenbuconazole or tebuconazole).

[0121] One of the objectives is to evaluate two BiOWiSH™ products (“Prototype” (Bacillus subtilis 34 KLB and Bacillus amyloliquefaciens at a ratio of about 1:1 by CFU) and GUARD′n SHIELD® (B. subtilis, B. licheniformis, B. pumilus, and B. subtilis KLB at a ratio of 3:1:3:1.3 by CFU)) as foliar sprays for the management of Black Sigatoka streak in Hawaii and compare with the grower practice (Manzate Max F (mancozeb), applied as foliar sprays).

[0122] In the study, three treatments were assigned separately to one of 3, three-row blocks of banana plants, a Cavendish variety, ‘Williams’. Each block contained approximately 160 production units (i.e., banana mats). The three treatments are specified below.

[0123] Treatment I.

[0124] Grower Practice (GP) spray formulation: Manzate (1.8 qt. per acre); Superior 70 oil (3 qt. per acre); Latron (3 oz. per acre); and approx. 12 gal. spray applied per acre.

[0125] Treatment II.

[0126] GUARD′n SHIELD® (GS) treatment spray formulation: 64 oz. Superior 70 oil; 20 mL GUARD′n SHIELD®; 2 oz. Latron spreader/sticker; and 10 gal. water.

[0127] Treatment III.

[0128] “Prototype” (P) treatment spray formulation: 64 oz. Superior 70 oil; 1 gram per gallon of “Prototype”; 2 oz. Latron spreader/sticker; and 10 gal. water.

[0129] Several plants per row at the inception of the trial were tagged in order to calculate the number of newly merged leaves at the end of the trial period. Leaves were tagged with surveyors tape at second leaf below the furled leaf, as these two leaves had not been sprayed with any fungicide previously (a sufficient number of days had elapsed since last spray treatment—these were newly emerged leaves since that date).

[0130] The products were applied using a 31″, tractor-mounted air-blast sprayer. Products were mixed in 10 gal tap water to achieve the specified concentration. Powdered or granular products were placed on the screen at the mouth of the spray tank and sprayed into the tank until dissolved. Products were agitated by the tank agitator for 10 minutes before sprays were applied. The land area for each treatment equaled ⅓ acre and approx. 4 gallons of spray was used on each treatment area.

[0131] Disease assessments were made visually according to the international disease assessment scale for Black Sigatoka. In this study, disease assessment began on the youngest leaf (i.e., the first fully opened leaf at the top of the plant and moved down the plant to the leaf that had been tagged with surveyors' tape). Each leaf was given an assessment number of 0 (no disease), 1, 2, 3, 4, 5 or 6 (>50% leaf area diseased). Numbers were transformed to percent disease by assigning the midpoint value for each category (0-6) to the leaf's disease assessment. For example, a leaf with an assessment value of 5 received a percent disease value of 42% (the midpoint between 34 and 50%).

[0132] Data were analyzed by analysis of variance (ANOVA) using he open-source software SOFA Statistics. The results and summary ANOVA tables appear below. Mean separation was performed by independent t-tests.

[0133] Key to the following analytical output tables: Gp=Grower practice; Gs=GUARD'n SHIELD®; P=Prototype; Sumdis=disease severity (%), summed for 8 leaves; YLS=youngest leaf spotted.

[0134] Disease severity (percentage of leaf area diseases, Black Sigatoka): ANOVA. The value of Disease severity was calculated for each plant by summing the severity values for each of the 8 leaves assessed for a plant (designated Sumdis in the data spreadsheet). These values were then submitted to the ANOVA procedure using the open-source software SOFA Statistics).

[0135] The effect of treatment on disease severity was significant (P<0.001).

[0136] Results of ANOVA test of average Sumdis for Trt groups from “Gp” to “P” are shown in Tables 1 and 2.

TABLE 1
Analysis of variance table

| | Sum of | | Mean Sum | | |
|---|---|---|---|---|---|
| Source | Squares | df | of Square | F | p |
| Between | 26803.047 | 2 | 13401.523 | 10.849 | <0.001 |
| | | | | | (7.616e−5) |
| Within | 88941.840 | 72 | 1235.303 | | |

[0137] In Table 1, O'Brien's test for homogeneity of variance: 2.116e-3.

TABLE 2
Group summary details

| | | | CI | Standard | | | | | p |
|---|---|---|---|---|---|---|---|---|---|
| Group | N | Mean | 95% | Deviation | Min | Max | Kurtosis | Skew | abnormal |
| Gp | 25 | 64.54 | 45.036- | 49.755 | 5.5 | 155.0 | −1.058 | 0.427 | 0.1852 |
| | | | 84.044 | | | | | | |
| Gs | 25 | 25.02 | 15.510- | 24.261 | 3.0 | 109.0 | 3.707 | 1.720 | <0.001 |
| | | | 34.530 | | | | | | (4.752e−5) |
| P | 25 | 23.88 | 13.950- | 25.332 | 1.0 | 88.0 | 0.200 | 1.169 | 0.03034 |
| | | | 33.810 | | | | | | |

[0138] Disease severity was significantly greater in the Grower Practice treatment.

[0139] “Prototype” did not differ significantly from GUARD′n SHIELD®.

[0140] Results of Independent Samples t-test of average “Sumdis” for Trt groups “Gs” vs “P”: p value: 0.8716; t statistic: 0.163; degrees of freedom (df): 48; O'Brien's test for homogeneity of variance: 0.8814.

[0141] Results of Independent Samples t-test of average “Sumdis” for Trt groups “Gp” vs “Gs”: p value: <0.001; t statistic: 3.57; degrees of freedom: 48; O'Brien's test for homogeneity of variance: 0.002.

[0142] There was a significant effect of treatment on YLS (p<0.001).

[0143] Results of ANOVA test of average YLS for Trt groups from “Gp” to “P” are shown in Tables 3 and 4.

TABLE 3
Analysis of variance table

| | Sum of | | Mean Sum | | |
|---|---|---|---|---|---|
| Source | Square | df | of Square | F | p |
| Between | 12.187 | 2 | 6.093 | 11.743 | <0.001 |
| | | | | | (3.856e−5) |
| Within | 37.360 | 72 | 0.519 | | |

[0144] In Table 3, O'Brien's test for homogeneity of variance: 0.5347.

TABLE 4
Group summary details

| | | | CI | Standard | | | | | p |
|---|---|---|---|---|---|---|---|---|---|
| Group | N | Mean | 95% | deviation | Min | Max | Kurtosis | Skew | abnormal |
| Gp | 25 | 4.88 | 4.619- | 0.666 | 4.0 | 7.0 | 2.604 | 0.990 | 4.055e−3 |
| | | | 5.141 | | | | | | |
| Gs | 25 | 5.16 | 4.943- | 0.554 | 4.0 | 6.0 | 0.055 | 0.091 | 0.8038 |
| | | | 5.377 | | | | | | |
| P | 25 | 5.84 | 5.488- | 0.898 | 5.0 | 8.0 | −0.579 | 0.669 | 0.2795 |
| | | | 6.192 | | | | | | |

[0145] Grower Practice and GUARD′n SHIELD® had significantly younger leaves with spots than did “Prototype.” Grower Practice did not differ significantly from GUARD′n SHIELD®.

[0146] Results of Independent Samples t-test of average “YLS” for Trt groups “Gp” vs “P”: p value: <0.001 (8.509e-5); t statistic: −4.293; Degrees of freedom: 48; and O'Brien's test for homogeneity of variance: 0.2040.

[0147] Results of Independent Samples t-test of average “YLS” for Trt groups “Gp” vs “Gs”: p value: 0.1125; t statistic: −1.617; Degrees of freedom: 48; and O'Brien's test for homogeneity of variance: 0.5347.

[0148] Disease severity was significantly greater for the Grower Practice than either GUARD′n SHIELD® or the Prototype. The Prototype showed overall lower average disease incidence. The Prototype showed a significant advantage when it comes to controlling Black Sigatoka on young banana tree leaves.

### Example 2. Varying the Ratio of Bacillus subtilis 34 KLB Over Bacillus amyloliquefaciens

[0149] Experimental protocol: (1) Streak and grow Bacillus subtilis 34 KLB and Bacillus amyloliquefaciens on trypticase soy agar (TSA) medium for 4-days. (2) Ratio derivation and procedure: (a) Using sterile technique, place full 5 loops of each bacillus in microcentrifuge tubes containing 4 mL sterile distilled water. Vortex each for 1 minute; (b) Create ratios in microcentrifuge tubes by pipetting aliquots of 200 microliters from each of the 4 mL suspension for B. subtilis 34 KLB and B. amyloliquefaciens (example: a 1:5 ratio was achieved by combining 200 microliters of 34 KLB and 1000 microliters of B. amyloliquefaciens). Repeat aliquot samples as needed to acquire sufficient volume for each ratio in the experiment; (c) Spot 20 microliters of each ratio onto a position onto 10% V8 juice agar surface. There were three plates (=reps) for each ratio; (d) Spot a 2 mm×2 mm square piece of Collectotrichum musae (fungus responsible for crown rot on bananas) on the opposing side of the Petri plate (3 plates each); and (e) After 10 days of growth at 25° C., measure inhibition zones by hand.

[0150] Table 5 shows the results. Mixtures appear to perform better than either Bacillus subtilis 34 KLB or Bacillus amyloliquefaciens.

TABLE 5

| | Clearing |
|---|---|
| Bacteria | Zone |
| 100% B. amyloliquefaciens | 9 mm |
| 100% B. subtilis 34 KLB | 8 mm |
| 1:1 B. subtilis 34 KLB: B. amyloliquefaciens | 19 mm |
| 2:1 B. subtilis 34 KLB: B. amyloliquefaciens | 12 mm |
| 5:1 B. subtilis 34 KLB: B. amyloliquefaciens | 17 mm |
| 10:1 B. subtilis 34 KLB: B. amyloliquefaciens | 20 mm |
| 1:2 B. subtilis 34 KLB: B. amyloliquefaciens | 20 mm |
| 1:5 B. subtilis 34 KLB: B. amyloliquefaciens | 15 mm |
| 1:10 B. subtilis 34 KLB: B. amyloliquefaciens | 18 mm |

### Example 3. Growth Inhibition Assays

[0151] The fungi were selected to represent a wide range of taxonomic orders. Many of the fungi were important plant pathogens in Hawaii. Isolations of plant pathogens were done from symptomatic host plant tissues, whereby fungal propagules or plant tissues were transferred first to Petri dishes containing water agar. Subsequently, hyphal tips or spores emerging on the water agar were transferred to a growth medium suitable for each fungal species, with 10% V8 juice agar being the predominant growth medium used. Fungi were identified to genus or species level by morphology and/or DNA sequences. In some cases, several different species of a given fungal genus were isolated and tested for inhibition.

[0152] BiOWiSH® Bacteria strains BW34 (B. subtilis), BW283 (B. amyloliquefaciens), and BW14 (Lactobacillus plantarum) were used. These strains were grown and maintained via periodic subcultures on the various growth media (trypticase soy agar (TSA), mannitol salt agar (MSA), nutrient agar (NA)).

[0153] BiOWiSH® bacterial strains were evaluated in Petri dishes for their inhibition of the mycelial growth at room temperature (approx. 22 to 23° C.) of various species of fungi. The BiOWiSH® bacteria were evaluated individually, not in combinations or mixtures. Most of the inhibition trials were conducted in Petri dishes on 10% V8 juice agar, upon which BiOWiSH® bacteria were spotted across from the test organisms (FIG. 2) in replicates of three dishes. In some cases, a BiOWiSH® organism was spotted at the center of the dish and the test organism spotted to the left and right of it, or vice versa. For fast-growing fungi, i.e., fungi capable of growing across the separating distance in 48 hours or less, culture plugs were spotted on the growth medium 3 days after spotting the BiOWiSH® strains. The delayed spotting allowed the circular, inhibitory zones of the BiOWiSH® organisms to become established by radial diffusion of the inhibitory compounds into the growth medium before the approach of fungal mycelium, preventing false negative results. Paired cultures were allowed to incubate until the zones of inhibition were established and visible (for sensitive fungi) or until the BiOWiSH® strain was overgrown by fungal species insensitive to the inhibitory zone. The diameters of the circular, inhibitory zones were measured in millimeters along the radii of the circles surrounding the BiOWiSH® strains and averaged among the three replicates.

[0154] Fungal plant pathogens screened for inhibition by BiOWiSH® strains BW34 and BW283 included, but were not limited to: Colletotrichum sp., Cladosporium colocasiae, Pseudocercospora ocimi-basilici, Colletotrichum musae, Mycosphaerella fijiensis, Cercospora ipomoea, Botrytis cinerea, Penicillium sp., Rhizopus sp., Phoma sp., Phytophthora colocasiae, Curvularia sp., Mucor sp., Nigrospora sp., Fusarium sp. (F. roseum), Fusarium oxysporum f sp. niveum, Chalara paradoxa (syn. Thielaviopsis paradoxa), Pestalotia sp., Stemphylium sp., Alternaria solani, Monolinia fructicola, Botrytis sp., Phytophtora palmivora, Phytophthora parasitica, Phytophthora infestans, Fusarium oxysporum f. sp. cubense (Foc).

[0155] BiOWiSH® bacterial strains were evaluated in Petri dishes for their inhibition of the growth at room temperature (approx. 22 to 23° C.) of several species of bacteria. A BiOWiSH® strain was spotted at the center of the dish, whereas a species of test bacteria was streaked in a square hashtag pattern about the center 3 days later. The intersecting corners of the square hashtag pattern were positioned near the edge of the expected inhibition zone (approx. 20 mm radius from center) from center, whereas the center of each of the four lines of the square were positioned at less than 20 mm from center. Then, after several days of growth, if inhibition was present, the effect was visible as lack of growth within the lines and normal growth beyond the corners of the square hashtag (FIG. 3A and FIG. 3B). Each bacterial species was paired against a BiOWiSH® strain with three replicate Petri dishes.

[0156] Bacterial plant pathogens screened for inhibition by BiOWiSH® strains BW34 and BW283: Xanthomonas campestris pv. Campestris, Enterobacter sp., Acidovorax sp. and Xanthomonas axonopodis pv. dieffenbachiae.

TABLE 6
Results from in vitro growth inhibition assays
Plate Inhibition Trials

| | | | | BW |
|---|---|---|---|---|
| Common Name | Species | Source Plant | Effective? | Species |
| Anthracnose | Colletotrichum sp. | Aloe | Yes | BW283, |
| | | | | BW34 |
| Ghost Spot | Cladosporium colocasiae | Taro | Yes | BW283, |
| | | | | BW34 |
| Leaf Spot | Pseudocercospora ocimi- | Basil | Yes (Strong) | BW283, |
| | basilici | | | BW34 |
| Crown Rot, | Colletotrichum musae | Banana | Yes | BW283, |
| Anthracnose | | | | BW34 |
| Black Sigatoka | Mycosphaerella fifiensis | Banana | Yes | BW14, |
| | | | | BW34, |
| | | | | BW283 |
| Cercospora leaf | Cercospora ipomoea | Beach Morning | Yes (Strong) | BW283 |
| spot | | Glory | | |
| Stem Blight | Botrytis cinerea | Fig | Yes (Strong) | BW34, |
| | | | | BW283 |
| Citrus Mold | Penicillium sp | Citrus | Yes (Strong) | BW34, |
| | | | | BW283 |
| Soft Rot | Rhizopus sp | Cannonball Tree | No | BW14, |
| | | | | BW34, |
| | | | | BW283 |
| Branch Canker and | Phoma sp | Milo | Reproductive | BW34, |
| dieback | | | Inhibition | BW283 |
| Leaf Blight | Phytophthora colocasiae | Taro | Slight | BW34, |
| | | | | BW283 |
| Leaf Blight | Curvularia sp | Turfgrass | Yes (Strong) | BW34, |
| | | | | BW283 |
| Fruit Rot | Mucor sp | Breadfruit | Yes | BW34, |
| | | | | BW283 |
| Leaf Blight | Fusarium sp Isolate 1 | Turfgrass | Possibly | BW34, |
| | | | | BW283 |
| Leaf Blight | Nigrospora sp | Turfgrass | Yes (Strong) | BW34, |
| | | | | BW283 |
| | Geotrichum sp | | No | BW283 |
| Wilt | Fusarium oxysporum f sp | Watermelon | Yes | BW34 |
| | niveum | | | |
| Crown Rot | Chalara paradoxa | Banana | Yes | BW34, |
| | (Thielaviopsis paradoxa) | | | BW283 |
| Brown Rot of Fruit | Monilinia fructicola | Nectarine | Yes | BW34, |
| | | | | BW283 |
| Black Rot | Xanthomonas campestris pv. | Cabbage | Yes | BW283 |
| | Campestris | | | |
| Gray mold of fruit | Botrytis sp | Peach | Yes | BW34, |
| | | | | BW283 |
| Black Mold | Alternaria solani | Tomato | Yes | BW34, |
| | | | | BW283 |
| | Stemphyllium sp. | | Yes | BW34 |
| Cigar-end rot | Pestalotia sp | Banana | Yes | BW34, |
| | | | | BW283 |
| Blight | Xanthomonas axonopodis | Anthurium | Yes | BW34, |
| | pv. Dieffenbachiae | | | BW283 |
| Black Rot | Xanthomonas campestris pv. | Cabbage | Yes | BW34, |
| | campestris (Xcc) | | | BW283 |
| Decay | Enterobacter sp | Collard | Yes | BW34 |
| Decay | Acidovorax sp | Lettuce | Yes | BW34 |
| Fusarium Wilt | Fusarium oxysporum f. sp. | Banana— | Yes | BW283, |
| (Panama Disease) | cubense race 1 | Hawaiian | | BW34 |
| | | Variegated | | |
| Muscadine disease | Beauveria bassiana | Banana Aphid | Yes | BW34 |
| of arthropods | | | | |
| Late Blight | Phytophthora infestans | Tomato | Yes (Strong) | BW34 |
| Fruit Blight | Phytophthora palmivora | Cocoa | No | BW34, |
| | | | | BW283 |

[0157] FIG. 4 shows examples of strong inhibition of fungal species Curvularia sp. by BW34 and BW283. FIG. 5 shows examples of no inhibition of fungal species Phytopthora palmivora by BW34 and BW283.

### Example 4. In Vitro Growth Screening Assays

[0158] Novel approaches to managing soilborne diseases of strawberry are in need due to the phase-out and increased regulation of commonly used soil fumigants in California such as methyl bromide and chloropicrin. Microbiologically-based intervention strategies are desirable due to their minimal adverse environmental impact. The objective of this study was to evaluate nineteen bacterial strains owned by BiOWiSH Technologies for their ability to suppress the strawberry pathogens Botrytis cinerea, Fusarium oxysporum f.sp. fragariae, Macrophomina phaseolina and Verticillium dahliae in vitro.

[0159] Prior to use in plant-pathogen inhibition screening, bacterial isolates were taken out of long-term storage and streaked with a sterile loop on either potato dextrose agar (PDA) or De Man, Rogosa and Sharpe (MRS) agar, depending upon the required growth medium. Plates were parafilmed and incubated upside-down for 18 to 24 hours at 35° C. After incubation, a 10 μL sterile loop was used to transfer each bacterium into separate conical tubes containing 10 mL of either trypticase soy broth (TSB) agar or MRS broth, and the broth containing bacteria was incubated for 18 to 24 hours at 35° C. These cultures were then centrifuged at 3000 rpm for 15 minutes at 25° C. Centrifugation was repeated for any bacteria that did not form a sufficient pellet in the conical tube. The supernatant in each tube was discarded and the pellet was re-suspended in 10 mL of previously autoclaved 0.1% peptone in deionized water. For the plant-pathogen inhibition screening, this solution of bacteria suspended in 0.1% peptone was plated within 6 hours.

[0160] There were two designs for the plant-pathogen inhibition screening that differed in their location of the fungal plant pathogen and bacterial antagonist (FIG. 6).

[0161] There were three replicates of each method for each unique combination of plant pathogen and bacterium. Each petri dish contained one plant pathogen, either Fusarium oxysporum f. sp. fragariae, Verticillium dahliae, Macrophomina phaseolina, or Botrytis cinerea. In a laminar flow hood, 6 mm mycelial plugs of each plant pathogen were placed in the proper location of the corresponding petri dish containing either MRS agar or PDA, depending on the growth requirement of the bacterium. Controls of the plant pathogen on both media were used to account for any difference in growth rate of the plant pathogen that may have been due to the difference in growth medium. There were three control plates for each method, and control plates included both MRS agar and PDA; control plates contained the plant pathogen alone, without the bacterial antagonist. There were also 3 plates of both PDA and MRS agar that neither the plant pathogen nor the bacterial isolated were plated on to ensure no contaminants were introduced through at any process during screening. After vortexing, 5 μL of each bacterial isolate in 0.1% peptone were pipetted on each corresponding petri dish that contained the 6 mm mycelial plug(s) placed mycelial side down earlier that day. Plates were moved into clear plastic boxes and stored in an incubator kept at room temperature (16.3 to 23.9° C.) for the duration of the experiment.

[0162] Appressed mycelial growth was traced directly on the underside of petri dishes with a colored sharpie on each day data were collected. The growth rate of each fungus determined which day data were collected and the duration the in vitro inhibition screening lasted. For instance, M. phaseolina grows quickly compared to other the other fungi examined, so inhibition data were collected every day and the inhibition screening lasted the least amount of time, whereas V. dahliae grows slower in comparison so data were taken at least every three days and the inhibition screening lasted the longest. At the end of the experiment, a template was used to divide each petri dish into eight equal parts (FIG. 7). The lines of the template were placed over the bacterial antagonist, and the growth (mm) of each fungus was measured along the line for each day growth had previously been traced.

[0163] The average mycelial growth (mm) for each unique combination of fungal plant pathogen and antagonistic bacterium was calculated for each day data were collected. Once the experiment had concluded, the Area Under the Growth Progress Curve (AUGPC) was calculated using the following equation:

$$AUGPC = \sum \frac{Growth T 1 + Growth T 2}{2} \times ( T 2 - T 1 )$$

where T1 is the last day assessed and T2 is the current day being assessed. Once the AUGPC for each unique combination of fungal plant pathogen and bacterium had been determined, percent fungal inhibition was calculated using the following equation:

$$\frac{\begin{matrix}( Control Fungus AUGPC ) - \\ ( AUGPC of Fungus Containing Bacterium )\end{matrix}}{( AUGPC Control Fungus )} \times 100 \%$$

[0164] The zone of fungal inhibition produced by each bacterium was determined on the last day of inhibition screening for each particular fungus (FIG. 8). Control plates, with each fungus introduced around the perimeter of the petri dish and no bacterial antagonist in the center, were used to verify somatic compatibility and to ensure that the fungus would indeed cover the entirety of the plate without any bacterium present. A template with two perpendicular lines that intersected at the center of the Petri dish was used to measure the diameter (mm) of the zone of inhibition. In plates that lacked a zone of inhibition, its absence was recorded. The control plates of V. dahliae showed that the fungus does not have somatic compatibility in its vegetative state (mycelium), so it was not included in the zone of inhibition experiment.

[0165] Bacillus amyloliquefaciens provided the greatest inhibition of B. cinerea overall; BW274, BW283, and BW280 inhibited fungal growth by an average of 45.3%, 44.1% and 41.8%, respectively. Three B. subtilis strains, BW273, BW281 and BW284 also inhibited fungal growth by a significant amount when compared to the control, although to lesser degree than B. amyloliquefaciens. All other bacteria did not inhibit mycelial growth of B. cinerea by a significant amount (Table 7).

TABLE 7
In vitro efficacy of four Bacillus species (15 strains total) against Botrytis cinerea.

| | | | AUGPC^{a} | | |
|---|---|---|---|---|---|
| Bacteria | | | | Tukey Pairwise | Inhibition |
| Species | Strain | Fungus | Mean | Comparison^{b} | (%)^{c} |
| Bacillus pumilus | BW285 | B. cinerea | 283.1 | A | −1.5 |
| Bacillus pumilus | BW275 | B. cinerea | 282.0 | A | −1.1 |
| Bacillus licheniformis | BW277 | B. cinerea | 279.4 | A | −0.2 |
| Bacillus licheniformis | BW286 | B. cinerea | 279.3 | A | −0.1 |
| Bacillus pumilus | BW279 | B. cinerea | 279.1 | A | 0.0 |
| Control PDA | | B. cinerea | 279.0 | A | 0.0 |
| Bacillus subtilis | BW34 | B. cinerea | 277.4 | A | 0.6 |
| Bacillus licheniformis | BW278 | B. cinerea | 275.3 | A | 1.3 |
| Bacillus licheniformis | BW276 | B. cinerea | 270.2 | A | 3.2 |
| Bacillus subtilis | BW282 | B. cinerea | 265.6 | A | 4.8 |
| Bacillus subtilis | BW284 | B. cinerea | 186.5 | B | 33.1 |
| Bacillus subtilis | BW281 | B. cinerea | 169.8 | BC | 39.1 |
| Bacillus subtilis mojavensis | BW273 | B. cinerea | 168.7 | BC | 39.5 |
| Bacillus amyloliquefaciens | BW280 | B. cinerea | 162.3 | C | 41.8 |
| Bacillus amyloliquefaciens | BW283 | B. cinerea | 156.0 | C | 44.1 |
| Bacillus amyloliquefaciens | BW274 | B. cinerea | 152.7 | C | 45.3 |

^{a}Area Under the Growth Progress Curve;
^{b} Grouping information generated using the Tukey Method and 99% confidence. Means that do not share a letter are significantly different;
^{c}Percent inhibition relative to the control.

[0166] All species of Bacillus that inhibited B. cinerea by a significant amount when examining AUGPC and percent inhibition had also established a clear zone of inhibition at the end of the experiment (Table 8). All other strains of bacteria did not have any zone of inhibition at the end of the experiment.

TABLE 8
In vitro zone of inhibition caused by bacterial antagonists against
Botrytis cinerea.

| Bacteria | | | Zone of Inhibition |
|---|---|---|---|
| Species | Strain | Fungus | (mm)^{a} |
| Bacillus subtilis | BW284 | B. cinerea | 8.2 |
| Bacillus subtilis mojavensis | BW273 | B. cinerea | 9.8 |
| Bacillus subtilis | BW281 | B. cinerea | 17.7 |
| Bacillus amyloliquefaciens | BW280 | B. cinerea | 18.5 |
| Bacillus amyloliquefaciens | BW274 | B. cinerea | 18.8 |
| Bacillus amyloliquefaciens | BW283 | B. cinerea | 19 |

^{a}Diameter of the clearing around each bacterium on the last day of the experiment (day 9).

[0167] Bacillus amyloliquefaciens provided the greatest inhibition of F. oxysporum f. sp. fragariae overall; BW274, BW280 and BW283 inhibited growth of the fungus by an average of 49.3%, 48.2% and 45.9%, respectively. Two B. subtilis strains, BW281 and BW284, inhibited fungal growth by a significant amount, although BW281 was almost twice as effective as BW284. BW278, a strain of B. licheniformis, also inhibited growth of the fungus by a significant amount. All other bacteria did not inhibit growth of F. oxysporum f. sp. fragariae by a significant amount (Table 9).

TABLE 9
In vitro efficacy of four Bacillus species (15 strains total) against Fusarium
oxysporum f sp. fragariae.

| | | | AUGPC^{a} | | |
|---|---|---|---|---|---|
| Bacteria | | | | Tukey Pairwise | Inhibition |
| Species | Strain | Fungus | Mean | Comparison^{b} | (%)^{c} |
| Bacillus pumilus | BW279 | F. oxysporum f. sp. f. | 446.3 | A | −1.7 |
| Bacillus pumilus | BW275 | F. oxysporum f. sp. f. | 443.6 | AB | −1.1 |
| Bacillus pumilus | BW285 | F. oxysporum f. sp. f. | 441.7 | ABC | −0.6 |
| Control PDA | | F. oxysporum f. sp. f. | 438.8 | ABC | 0.0 |
| Bacillus subtilis | BW34 | F. oxysporum f. sp. f. | 436.3 | ABC | 0.6 |
| Bacillus subtilis | BW282 | F. oxysporum f. sp. f. | 433.6 | ABC | 1.2 |
| Bacillus licheniformis | BW277 | F. oxysporum f. sp. f. | 427.4 | ABC | 2.6 |
| Bacillus licheniformis | BW276 | F. oxysporum f. sp. f. | 425.9 | ABC | 2.9 |
| Bacillus subtilis | BW273 | F. oxysporum f. sp. f. | 416.3 | BCD | 5.1 |
| mojavensis | | | | | |
| Bacillus licheniformis | BW286 | F. oxysporum f. sp. f. | 412.9 | CD | 5.9 |
| Bacillus licheniformis | BW278 | F. oxysporum f. sp. f. | 389.8 | D | 11.2 |
| Bacillus subtilis | BW284 | F. oxysporum f. sp. f. | 354.1 | E | 19.3 |
| Bacillus subtilis | BW281 | F. oxysporum f. sp. f. | 249.5 | F | 43.1 |
| Bacillus | BW283 | F. oxysporum f. sp. f. | 237.3 | F | 45.9 |
| amyloliquefaciens | | | | | |
| Bacillus | BW280 | F. oxysporum f. sp. f. | 227.4 | F | 48.2 |
| amyloliquefaciens | | | | | |
| Bacillus | BW274 | F. oxysporum f. sp. f. | 222.7 | F | 49.3 |
| amyloliquefaciens | | | | | |

^{a}Area Under the Growth Progress Curve;
^{b}Grouping information generated using the Tukey Method and 99% confidence. Means that do not share a letter are significantly different;
^{c}Percent inhibition relative to the control.

[0168] All strains of B. amyloliquefaciens (BW274, BW280, and BW283) and one strain of B. subtilis (BW281) had produced a zone of inhibition at the end of the experiment (Table 10).

TABLE 10
In vitro zone of inhibition caused by bacterial antagonists against
Fusarium oxysporum f. sp. fragariae.

| | | | Zone of |
|---|---|---|---|
| Bacteria | | | Inhibition |
| Species | Strain | Fungus | (mm)^{a} |
| Bacillus subtilis | BW281 | F. oxysporum f. sp. f. | 13.5 |
| Bacillus amyloliquefaciens | BW283 | F. oxysporum f. sp. f. | 20.3 |
| Bacillus amyloliquefaciens | BW280 | F. oxysporum f. sp. f. | 24 |
| Bacillus amyloliquefaciens | BW274 | F. oxysporum f. sp. f. | 24.2 |

^{a}Diameter of the clearing around each bacterium on the last day of the experiment (day 16).

[0169] Bacillus amyloliquefaciens provided the greatest inhibition of M. phaseolina overall; BW283, BW274 and BW280 inhibited radial growth of the fungus by an average of 48.3%, 40.1% and 39.9%, respectively. Three strains of B. subtilis (BW281, BW284 and BW273) also inhibited growth of the fungus significantly, although this amount was less than that of all B. amyloliquefaciens strains examined. All other bacteria examined did not inhibit mycelial growth of M. phaseolina by a significant amount (Table 11).

TABLE 11
In vitro efficacy of four Bacillus species (15 strains total) against
Macrophomina phaseolina.

| | | | AUGPC^{a} | | |
|---|---|---|---|---|---|
| | | | | Tukey | |
| Bacteria | | | | Pairwise | Inhibition |
| Species | Strain | Fungus | Mean | Comparison^{b} | (%)^{c} |
| Bacillus licheniformis | BW286 | M. phaseolina | 150.5 | A | −5.6 |
| Bacillus pumilus | BW275 | M. phaseolina | 146.7 | AB | −2.9 |
| Bacillus pumilus | BW279 | M. phaseolina | 144.2 | ABC | −1.2 |
| Bacillus pumilus | BW285 | M. phaseolina | 143.3 | ABC | −0.5 |
| Control PDA | Control | M. phaseolina | 142.5 | ABC | 0.0 |
| | PDA | | | | |
| Bacillus subtilis | BW34 | M. phaseolina | 134.3 | ABC | 5.8 |
| Bacillus subtilis | BW282 | M. phaseolina | 128.9 | ABC | 9.5 |
| Bacillus licheniformis | BW278 | M. phaseolina | 124.9 | BC | 12.3 |
| Bacillus licheniformis | BW277 | M. phaseolina | 124.4 | BC | 12.7 |
| Bacillus licheniformis | BW276 | M. phaseolina | 121.7 | C | 14.6 |
| Bacillus subtilis mojavensis | BW273 | M. phaseolina | 98.0 | D | 31.2 |
| Bacillus subtilis | BW284 | M. phaseolina | 88.2 | DE | 38.1 |
| Bacillus subtilis | BW281 | M. phaseolina | 85.8 | DE | 39.8 |
| Bacillus amyloliquefaciens | BW280 | M. phaseolina | 85.7 | DE | 39.9 |
| Bacillus amyloliquefaciens | BW274 | M. phaseolina | 85.4 | DE | 40.1 |
| Bacillus amyloliquefaciens | BW283 | M. phaseolina | 73.6 | E | 48.3 |

^{a}Area Under the Growth Progress Curve;
^{b}Grouping information generated using the Tukey Method and 99% confidence. Means that do not share a letter are significantly different;
^{c}Percent inhibition relative to the control.

[0170] All species of Bacillus that inhibited M. phaseolina by a significant amount when examining AUGPC and percent inhibition had also established a clear zone of inhibition at the end of the experiment (Table 12). All other strains of bacteria did not have any zone of inhibition at the end of the experiment.

TABLE 12
In vitro zone of inhibition caused by bacterial antagonists against
Fusarium oxysporum f sp. fragariae.

| Bacteria | | | Zone of Inhibition |
|---|---|---|---|
| Species | Strain | Fungus | (mm)^{a} |
| Bacillus subtilis mojavensis | BW273 | M. phaseolina | 14.7 |
| Bacillus subtilis | BW284 | M. phaseolina | 16.3 |
| Bacillus amyloliquefaciens | BW274 | M. phaseolina | 24.8 |
| Bacillus subtilis | BW281 | M. phaseolina | 25.3 |
| Bacillus amyloliquefaciens | BW280 | M. phaseolina | 25.8 |
| Bacillus amyloliquefaciens | BW283 | M. phaseolina | 25.8 |

^{a}Diameter of the clearing around each bacterium on the last day of the experiment (day 6).

[0171] With the exception of BW285, all strains of Bacillus examined inhibited radial mycelial growth of V. dahliae by a significant amount when compared to the control (Table 13).

TABLE 13
In vitro efficacy of four Bacillus species (15 strains total) against Verticillium dahliae.

| | | | AUGPC^{a} | | |
|---|---|---|---|---|---|
| Bacteria | | | | Tukey Pairwise | Inhibition |
| Species | Strain | Fungus | Mean | Comparison^{b} | (%)^{c} |
| Control PDA | | V. dahliae | 765.5 | A | 0.0 |
| Bacillus pumilus | BW285 | V. dahliae | 677.9 | AB | 11.4 |
| Bacillus pumilus | BW279 | V. dahliae | 669.4 | BC | 12.6 |
| Bacillus pumilus | BW275 | V. dahliae | 661.7 | BC | 13.6 |
| Bacillus subtilis | BW282 | V. dahliae | 620.8 | BC | 18.9 |
| Bacillus licheniformis | BW277 | V. dahliae | 595.8 | BC | 22.2 |
| Bacillus subtilis | BW34 | V. dahliae | 578.5 | C | 24.4 |
| Bacillus licheniformis | BW278 | V. dahliae | 481.8 | D | 37.1 |
| Bacillus licheniformis | BW276 | V. dahliae | 478.9 | D | 37.4 |
| Bacillus licheniformis | BW286 | V. dahliae | 469.5 | D | 38.7 |
| Bacillus subtilis mojavensis | BW273 | V. dahliae | 466.0 | D | 39.1 |
| Bacillus subtilis | BW284 | V. dahliae | 433.3 | D | 43.4 |
| Bacillus amyloliquefaciens | BW283 | V. dahliae | 309.0 | E | 59.6 |
| Bacillus amyloliquefaciens | BW280 | V. dahliae | 306.8 | E | 59.9 |
| Bacillus amyloliquefaciens | BW274 | V. dahliae | 299.9 | E | 60.8 |
| Bacillus subtilis | BW281 | V. dahliae | 283.2 | E | 63.0 |

^{a}Area Under the Growth Progress Curve;
^{b}Grouping information generated using the Tukey Method and 99% confidence. Means that do not share a letter are significantly different;
^{c}Percent inhibition relative to the control.

[0172] This portion of the experiment was not conducted due to vegetative incompatibility of V. dahliae.

[0173] A subset of the most effective bacterial strains in vitro was selected for in-planta experiments (Examples 5 and 6).

### Example 5. In-Planta Greenhouse Evaluations of BiOWiSH® and Commercial Strains of Bacteria for Suppression of Macrophomina Crown Rot and Verticillium Wilt

[0174] Novel approaches to managing soilborne diseases of strawberry are in need due to the phase-out and increased regulation of commonly used soil fumigants in California such as methyl bromide and chloropicrin. Microbiologically-based intervention strategies are desirable due to their minimal adverse environmental impact. The objective of this study was to evaluate five bacterial strains owned by BiOWiSH Technologies and two commercial products for their ability to suppress crown rot and wilt of strawberry caused by the soilborne fungi Macrophomina phaseolina and Verticillium dahliae under greenhouse conditions.

[0175] M. phaseolina and V. dahliae inoculum containing microsclerotia was created using a previously described method. Isolates Mp8, Mp21, Mp22 and Vd1, Vd3, Vd7, Vd20 from the Ivors lab culture collection were used to produce the Macrophomina and Verticillium inoculum respectively. Isolates were plated on PDA, and after three days, a few 5 mm agar plugs of each culture were aseptically added to a 500 mL bottle containing 250 mL of a sterile sand-cornmeal medium (V:V ratio of 1.1 sand:0.4 cornmeal:0.4 deionized water). The inoculum was incubated in the dark at 25° C. and shaken every 1 to 2 days to promote uniform distribution of the fungus in the mixture. After three weeks of incubation, a dissecting microscope was used to verify the cornmeal had been fully colonized by the fungus. The inoculum was then poured onto flat metal trays, all isolates were mixed, and allowed to dry in the dark at room temperature for roughly three weeks.

[0176] Ten grams of the inoculum was added to trade one-gallon pots containing roughly 565 grams of potting substrate. In an attempt to uniformly distribute the inoculum throughout the potting mix, both the inoculum and potting substrate were added to a plastic bag, shaken, then placed back into the pots. For enumeration of the inoculum, a mortar and pestle was used to grind the inoculum, which was then passed through a 0.180 mm sieve. This ground inoculum was suspended in sterile water, serially diluted, and plated onto a semi-selective medium (6 plates for each dilution). Plates were stored in the dark at room temperature and enumerated after five days.

[0177] To determine the number of colony forming units (CFU) applied, the spread plate method was used. Overnight cultures were serially diluted in sterile deionized water and plated onto either trypticase soy agar (TSA) or De Man, Rogosa and Sharpe (MRS) agar, depending on the required growth medium. All bacteria were applied in the greenhouse on the same day the spread plating occurred. Plates were incubated overnight and CFUs were counted the next day.

[0178] For the Macrophomina trial, the cultivar San Andreas was used; for the Verticillium trial, the cultivar Portola was used. Plants were grown in trade one-gallon pots filled with Miracle-Gro Potting Mix.

[0179] A total of seven strains of bacteria were evaluated for their ability to inhibit crown rot of strawberry caused by Macrophomina phaseolina (Table 14) and Verticillium wilt caused by Verticillium dahliae (Table 15).

[0180] Table 14. Bacteria used in the in-planta evaluation of bacterial stains for suppression of strawberry crown rot caused by Macrophomina phaseolina.

| Company | Product | Species | Strain |
|---|---|---|---|
| BiOWiSH | Not | Bacillus licheniformis | BW276 |
| Technologies | Commercially | Pediococcus pentosaceus | BW13 |
| | Available | Lactobacillus plantarum | BW14 |
| | | Bacillus subtilis | BW281 |
| | | Bacillus amyloliquefaciens | BW283 |
| Bayer | Serenade ASO | Bacillus subtilis | QST 713 |
| Certis USA | Double Nickel | Bacillus amyloliquefaciens | D747 |
| | LC | | |

TABLE 15
Bacteria used in the in-planta evaluation of bacterial stains for
suppression of strawberry wilt caused by Verticillium dahliae.

| Company | Product | Species | Strain |
|---|---|---|---|
| BiOWiSH | Not | Bacillus licheniformis | BW276 |
| Technologies | Commercially | Pediococcus acidilactici | BW12 |
| | Available | Lactobacillus plantarum | BW14 |
| | | Bacillus subtilis | BW281 |
| | | Bacillus amyloliquefaciens | BW283 |
| Bayer | Serenade ASO | Bacillus subtilis | QST 713 |
| Certis USA | Double Nickel | Bacillus amyloliquefaciens | D747 |
| | LC | | |

[0181] Each strain was evaluated using four different treatment applications (Table 16).

TABLE 16
Four different treatment applications were evaluated
during the in-planta trial.

| Treatment | Application method |
|---|---|
| 1 | Root Dip on Day 0, Drench on Day 8 |
| 2 | Drench on Day 0, Drench on Day 8 |
| 3 | Root Dip on Day 0, Drench on Day 8, Drench on Day 19 |
| 4 | Root Dip on Day 0, Drench on Day 8, Drench on Day 19, |
| | Drench on Day 29 |

[0182] These applications varied by the total number and type of initial application (root dip vs. drench). All subsequent applications after Day 0 were soil drenches. Soil drenches were applied as 450 mL of bacterial suspension per pot; final strain concentrations are reported (Table 16). For experimental controls, deionized water alone was applied, either as a root dip or a drench on Day 0, and also at each time throughout the experiment that an application took place. There were also control plants that were not inoculated with the pathogen and were never treated with any bacteria. Each unique combination of application method and bacterial strain, as well as all controls, was applied on 6 plant replicates.

[0183] For every root dip application (Treatment 1, 3, and 4), roots were dipped in a bacterial suspension of 107 CFU/mL for 5 minutes and planted immediately. For Treatment 2, the soil was drenched on Day 0 and plants were planted two days later. Every application after Day 0 was a soil drench (Table 20). After all plants were planted, the pots were distributed randomly by rep on the greenhouse bench.

[0184] To determine whether M. phaseolina or V. dahliae was infecting plants, the first two plants from each treatment to die (i.e. exhibit 100% wilting/necrosis) were plated on semi-selective media. Crown pieces were excised, surface disinfested in sodium hypochlorite, and added to 2 plates containing acidified potato dextrose agar (APDA) and 1 plate containing RB media for Macrophomina or 2 plates containing NP-10 media for Verticillium. Each plate received four crown pieces. Later, plates were examined for the presence of either pathogen.

[0185] Disease assessments were performed every seven days beginning on Day 23 and ending on Day 107. Disease development was assessed using a rating scale as shown in FIG. 9.

[0186] Ratings were converted to percent disease (1=0%, 2=25%, 3=50%, 4=75%, 5=100% disease), then used to calculate the Area Under Disease Progress Curve (AUDPC) for each plant. Analysis of Variance was used to determine differences between bacterial strains within treatments with a p-value of 0.05. Separate analyses were performed for BiOWiSH® strains and commercial products.

[0187] Based upon enumeration of fungal colonies on the semi-selective medium (n=6), it was determined that the M. phaseolina inoculated pots contained a final concentration of 2,539 CFU per gram of potting substrate in each pot, and the V. dahliae inoculated pots contained a final concentration of 200 CFU per gram of potting substrate in each pot.

[0188] All BiOWiSH® strains were enumerated using the spread plate method and applied in the greenhouse on the same day that plating occurred (Table 17).

TABLE 17
Final CFU/mL of BiOWiSH ® bacteria applied in the greenhouse after
dilution of overnight cultures in deionized water.

| | Macrophomina | | Verticillium | |
|---|---|---|---|---|
| | trial Strain | | trial Strain | |
| Application day | CFU/mL applied | | CFU/mL applied | |
| 0 | BW 283 | 9.8 × 10\hat{ }7 | BW 283 | 6.7 × 10\hat{ }7 |
| 0 | BW 281 | 3.1 × 10\hat{ }7 | BW 281 | 4.5 × 10\hat{ }7 |
| 0 | BW 276 | 5.3 × 10\hat{ }7 | BW 276 | 6.6 × 10\hat{ }7 |
| 0 | BW 14 | 1.5 × 10\hat{ }7 | BW 14 | 3.3 × 10\hat{ }7 |
| 0 | BW 13 | 2.6 × 10\hat{ }7 | BW 12 | 3.6 × 10\hat{ }7 |
| 8 | BW 283 | 8.2 × 10\hat{ }6 | BW 283 | 3.4 × 10\hat{ }7 |
| 8 | BW 281 | 4.0 × 10\hat{ }7 | BW 281 | 5.0 × 10\hat{ }7 |
| 8 | BW 276 | 7.9 × 10\hat{ }6 | BW 276 | 3.1 × 10\hat{ }7 |
| 8 | BW 14 | 2.2 × 10\hat{ }7 | BW 14 | 2.8 × 10\hat{ }7 |
| 8 | BW 13 | 2.6 × 10\hat{ }7 | BW 12 | 4.5 × 10\hat{ }7 |
| 19 | BW 283 | 8.8 × 10\hat{ }7 | BW 283 | 9.1 × 10\hat{ }7 |
| 19 | BW 281 | 2.7 × 10\hat{ }7 | BW 281 | 3.3 × 10\hat{ }7 |
| 19 | BW 276 | 2.1 × 10\hat{ }7 | BW 276 | 2.9 × 10\hat{ }7 |
| 19 | BW 14 | 1.8 × 10\hat{ }7 | BW 14 | 1.9 × 10\hat{ }7 |
| 19 | BW 13 | 2.2 × 10\hat{ }7 | BW 12 | 4.4 × 10\hat{ }7 |
| 29 | BW 283 | 9.3 × 10\hat{ }7 | BW 283 | 8.9 × 10\hat{ }7 |
| 29 | BW 281 | 2.4 × 10\hat{ }7 | BW 281 | 5.2 × 10\hat{ }7 |
| 29 | BW 276 | 1.1 × 10\hat{ }8 | BW 276 | 3.2 × 10\hat{ }7 |
| 29 | BW 14 | 2.2 × 10\hat{ }7 | BW 14 | 5.5 × 10\hat{ }7 |
| 29 | BW 13 | 2.2 × 10\hat{ }7 | BW 12 | 5.8 × 10\hat{ }7 |

[0189] Disease assessments were performed weekly for 84 total days and the AUDPC for each plant was calculated (Tables 18 and 19).

TABLE 18
Mean Area Under Disease Progress Curve of each bacterial antagonist and treatment combination for the
Macrophomina phaseolina trial.

| Treatment | Timing | Day 107 | AUDPC |
|---|---|---|---|
| Serenade ASO | 1. Root Dip on Day 0, Drench on Day 10 | 62.5 | 4893.8 |
| Serenade ASO | 2. Drench on Day 0, Drench on Day 10 | 91.7 | 2712.5 |
| Serenade ASO | 3. Root Dip on Day 0, Drench on Day 10, Drench on Day 20 | 79.2 | 4597.9 |
| Serenade ASO | 4. Root Dip on Day 0, Drench on Day 10, Drench on Day 20, Drench on Day 30 | 54.2 | 3893.8 |
| DoubleNickel LC | 1. Root Dip on Day 0, Drench on Day 10 | 54.2 | 2143.8 |
| DoubleNickel LC | 2. Drench on Day 0, Drench on Day 10 | 58.3 | 2975.0 |
| DoubleNickel LC | 3. Root Dip on Day 0, Drench on Day 10, Drench on Day 20 | 45.8 | 2239.6 |
| DoubleNickel LC | 4. Root Dip on Day 0, Drench on Day 10, Drench on Day 20, Drench on Day 30 | 66.7 | 2625.0 |
| BW 283 | 1. Root Dip on Day 0, Drench on Day 10 | 58.3 | 3529.2 |
| BW 283 | 2. Drench on Day 0, Drench on Day 10 | 62.5 | 2289.6 |
| BW 283 | 3. Root Dip on Day 0, Drench on Day 10, Drench on Day 20 | 50.0 | 1866.7 |
| BW 283 | 4. Root Dip on Day 0, Drench on Day 10, Drench on Day 20, Drench on Day 30 | 58.3 | 2216.7 |
| BW 281 | 1. Root Dip on Day 0, Drench on Day 10 | 75.0 | 3529.2 |
| BW 281 | 2. Drench on Day 0, Drench on Day 10 | 66.7 | 3791.7 |
| BW 281 | 3. Root Dip on Day 0, Drench on Day 10, Drench on Day 20 | 70.0 | 2415.0 |
| BW 281 | 4. Root Dip on Day 0, Drench on Day 10, Drench on Day 20, Drench on Day 30 | 70.8 | 2872.9 |
| BW 14 | 1. Root Dip on Day 0, Drench on Day 10 | 54.2 | 1618.8 |
| BW 14 | 2. Drench on Day 0, Drench on Day 10 | 58.3 | 3208.3 |
| BW 14 | 3. Root Dip on Day 0, Drench on Day 10, Drench on Day 20 | 87.3 | 1881.3 |
| BW 14 | 4. Root Dip on Day 0, Drench on Day 10, Drench on Day 20, Drench on Day 30 | 45.8 | 2085.4 |
| BW 13 | 1. Root Dip on Day 0, Drench on Day 10 | 79.2 | 2085.4 |
| BW 13 | 2. Drench on Day 0, Drench on Day 10 | 70.8 | 3572.9 |
| BW 13 | 3. Root Dip on Day 0, Drench on Day 10, Drench on Day 20 | 66.7 | 4229.2 |
| BW 13 | 4. Root Dip on Day 0, Drench on Day 10, Drench on Day 20, Drench on Day 30 | 75.0 | 3645.8 |
| BW 276 | 1. Root Dip on Day 0, Drench on Day 10 | 54.2 | 2435.4 |
| BW 276 | 2. Drench on Day 0, Drench on Day 10 | 70.8 | 3581.3 |
| BW 276 | 3. Root Dip on Day 0, Drench on Day 10, Drench on Day 20 | 58.3 | 1779.2 |
| BW 276 | 4. Root Dip on Day 0, Drench on Day 10, Drench on Day 20, Drench on Day 30 | 62.5 | 2260.4 |
| Inoculated Water Control | 1. Drench on Day 0, Drench on Day 10, Drench on Day 20, Drench on Day 30 | 75.0 | 3500.0 |
| Inoculated Water Control | 2. Root Dip on Day 0, Drench on Day 10, Drench on Day 20, Drench on Day 30 | 91.7 | 3441.7 |
| NON-Inoculated Water | 1. Drench on Day 0, Drench on Day 10, Drench on Day 20, Drench on Day 30 | 29.2 | 1210.4 |
| NON-Inoculated Water | 2. Root Dip on Day 0, Drench on Day 10, Drench on Day 20, Drench on Day 35 | 29.2 | 802.1 |

TABLE 19
Mean Area Under Disease Progress Curve of each bacterial antagonist and treatment combination for the
Verticillium dahliae trial.

| Treatment | Timing | Day 107 | AUDPC |
|---|---|---|---|
| Serenade ASO | 1. Root Dip on Day 0, Drench on Day 10 | 91.7 | 3558.3 |
| Serenade ASO | 2. Drench on Day 0, Drench on Day 10 | 95.8 | 3602.1 |
| Serenade ASO | 3. Root Dip on Day 0, Drench on Day 10, Drench on Day 20 | 95.8 | 3397.9 |
| Serenade ASO | 4. Root Dip on Day 0, Drench on Day 10, Drench on Day 20, Drench on Day 30 | 87.5 | 2989.6 |
| DoubleNickel LC | 1. Root Dip on Day 0, Drench on Day 10 | 95.8 | 3572.9 |
| DoubleNickel LC | 2. Drench on Day 0, Drench on Day 10 | 95.8 | 3485.4 |
| DoubleNickel LC | 3. Root Dip on Day 0, Drench on Day 10, Drench on Day 20 | 95.8 | 3339.6 |
| DoubleNickel LC | 4. Root Dip on Day 0, Drench on Day 10, Drench on Day 20, Drench on Day 30 | 87.5 | 2931.3 |
| BW 283 | 1. Root Dip on Day 0, Drench on Day 10 | 95.8 | 3514.6 |
| BW 283 | 2. Drench on Day 0, Drench on Day 10 | 100.0 | 3470.8 |
| BW 283 | 3. Root Dip on Day 0, Drench on Day 10, Drench on Day 20 | 95.8 | 3397.9 |
| BW 283 | 4. Root Dip on Day 0, Drench on Day 10, Drench on Day 20, Drench on Day 30 | 95.8 | 3310.4 |
| BW 281 | 1. Root Dip on Day 0, Drench on Day 10 | 100.0 | 3587.5 |
| BW 281 | 2. Drench on Day 0, Drench on Day 10 | 100.0 | 3412.5 |
| BW 281 | 3. Root Dip on Day 0, Drench on Day 10, Drench on Day 20 | 100.0 | 3500.0 |
| BW 281 | 4. Root Dip on Day 0, Drench on Day 10, Drench on Day 20, Drench on Day 30 | 95.8 | 3368.8 |
| BW 14 | 1. Root Dip on Day 0, Drench on Day 10 | 100.0 | 3441.7 |
| BW 14 | 2. Drench on Day 0, Drench on Day 10 | 100.0 | 3500.0 |
| BW 14 | 3. Root Dip on Day 0, Drench on Day 10, Drench on Day 20 | 95.8 | 3456.3 |
| BW 14 | 4. Root Dip on Day 0, Drench on Day 10, Drench on Day 20, Drench on Day 30 | 91.7 | 3120.8 |
| BW 12 | 1. Root Dip on Day 0, Drench on Day 10 | 100.0 | 3412.5 |
| BW 12 | 2. Drench on Day 0, Drench on Day 10 | 95.8 | 3485.4 |
| BW 12 | 3. Root Dip on Day 0, Drench on Day 10, Drench on Day 20 | 95.8 | 2872.9 |
| BW 12 | 4. Root Dip on Day 0, Drench on Day 10, Drench on Day 20, Drench on Day 30 | 87.5 | 2989.6 |
| BW 276 | 1. Root Dip on Day 0, Drench on Day 10 | 100.0 | 3587.5 |
| BW 276 | 2. Drench on Day 0, Drench on Day 10 | 95.8 | 3602.1 |
| BW 276 | 3. Root Dip on Day 0, Drench on Day 10, Drench on Day 20 | 100.0 | 3616.7 |
| BW 276 | 4. Root Dip on Day 0, Drench on Day 10, Drench on Day 20, Drench on Day 30 | 100.0 | 3441.7 |
| Inoculated Water Control | 1. Drench on Day 0, Drench on Day 10, Drench on Day 20, Drench on Day 30 | 95.8 | 3660.4 |
| Inoculated Water Control | 2. Root Dip on Day 0, Drench on Day 10, Drench on Day 20, Drench on Day 30 | 91.7 | 3587.5 |
| NON-Inoculated Water | 1. Drench on Day 0, Drench on Day 10, Drench on Day 20, Drench on Day 30 | 12.5 | 247.9 |
| NON-Inoculated Water | 2. Root Dip on Day 0, Drench on Day 10, Drench on Day 20, Drench on Day 35 | 12.5 | 247.9 |

[0190] M. phaseolina and V. dahliae were successfully isolated from symptomatic crown tissue most of the time, ranging from 58% to 87% for Macrophomina and 80 to 92% for Verticillium (FIG. 10A and FIG. 10B).

### Example 6. Pineapple Black Rot In Vivo Study

[0191] Pineapple Black Rot (Chalara paradoxa, Ceratocystic paradox, or Theilaviopsis paradoxa) is a major problem in the pineapple industry. Infection can occur in the field or during the post-harvest process. Infection occurs through wound sites on the fruit and destroys the soft tissue of the fruit.

[0192] BiOWiSH® biocontrol product Guard'n Fresh (B. subtilis, B. licheniformis, B. pumilus, and B. subtilis KLB at a ratio of 3:1:3:1.3 by CFU) and a BiOWiSH® prototype (Bacillus subtilis 34 KLB and Bacillus amyloliquefaciens at a ratio of about 1:1 by CFU) were evaluated for their potential to reduce black rot of pineapple caused by the fungus Chalara paradoxa. Pineapple fruits were supplied by Dole. Chalara pardoxa was isolated from banana and cultured on 10% V8 juice agar. The pineapple fruits were intentionally wounded to provide entry site for the pathogen. Immediately after inoculation with the pathogen the fruits were treated with the BiOWiSH® treatment then stored in plastic bags at high humidity overnight. This was followed by 10 days storage at room temperature. The fruits were evaluated for infection after the 10-day storage period. The experimental design is shown in Table 20.

TABLE 20

| | | BiOWiSH ™ | |
|---|---|---|---|
| | | GUARD'n | BiOWiSH ® |
| | | FRESH | Prototype 1, 1 |
| | No Treatment | 2 mL/gallon | gram/gallon |
| No inoculation | Cell 1 - Negative | Cell 4* | Cell 7* |
| | Control* | | |
| Inoculation with | Cell 2 - Positive | Cell 5 | Cell 8 |
| 1 × 10³/mL | Control | | |
| Inoculation with | Cell 3 - Positive | Cell 6 | Cell 9 |
| 1 × 10⁶/mL | Control | | |

[0193] There were 2 fruits per treatment for the fungal inoculated legs and 3 fruits per treatment for the no fungal inoculation legs, for a total of 21 fruits.

[0194] After the 10-day room temperature storage period the fruits were sectioned longitudinally and the percentage of fruit area diseased calculated via image analysis.

[0195] Pineapple treated with BiOWiSH® products showed significantly fewer incidents of Black Rot, both in the uninoculated and low-dose inoculated legs (FIG. 11).

[0196] The presence of Black Rot in uninoculated fruit (FIG. 11) shows that the fruit were already infected when purchased. Treatment of these fruit with BiOWiSH® showed a significant reduction in Black Rot relative to the control. There was no difference significant difference between BiOWiSH® products.

[0197] Both BiOWiSH® products gave a significant reduction in Black Rot at low (1×10³ CFU/mL) C. paradoxa inoculation. At the higher inoculation level (1×10⁶ CFU/mL) the BiOWiSH® showed no efficacy in controlling Black Rot infection.

[0198] This test demonstrates the potential for BiOWiSH® biocontrol products to control Black Rot. More repetitions are needed in order to confirm these initial findings.

### Example 7. Mango Anthracnose Field Trial

[0199] Evaluate the potential for sprays of BiOWiSH® Guard'n Shield (B. subtilis, B. licheniformis, B. pumilus, and B. subtilis KLB at a ratio of 3:1:3:1.3 by CFU) and BiOWiSH® Prototype (Bacillus subtilis 34 KLB and Bacillus amyloliquefaciens at a ratio of about 1:1 by CFU).

[0200] Several varieties of mango were tested including Maha janok, Repoza, Gloden Glow, Peach 1, Roberto 2, r2e2, Kensington pride, Paris and Keitt. Field testing was conducted in two locations where the pathogen had previously been shown to be naturally occurring. Beginning at flowering, mango panicles were sprayed weekly with:
[0201] Treatment 1: BiOWiSH® Guard'n Shield at 2 mL/gallon using a backpack sprayer (5-10 panicles per tree)
[0202] Treatment 2: BiOWiSH® prototype at 1 gram/gallon using a backpack sprayer. (5-10 panicles per tree).
[0203] Treatment 3: Control—water only (5-10 panicles per tree).

[0204] Each of 5-8 trees per test location were divided equally into thirds, one for each treatment, using surveyors' tape and each tree received all three treatments. Each panicle was tagged with flagging tape and identified numerically. Each treatment was repeated weekly until fruits reached full size.

TABLE 21

| Treatment | N | Mean | Grouping |
|---|---|---|---|
| Control | 34 | 20.25 | A |
| Prototype | 22 | 2.77 | B |
| Guard'n Shield | 13 | 1.50 | B |

Means that do not share a letter are significantly different

[0205] Both BiOWiSH® biocontrol products controlled anthracnose of mango significantly better than the control.

### EQUIVALENTS

[0206] While the present invention has been described in conjunction with the specific embodiments set forth above, many alternatives, modifications and other variations thereof will be apparent to those of ordinary skill in the art. All such alternatives, modifications and variations are intended to fall within the spirit and scope of the present invention.

The application's sequence listing, which the Patent Office published only in electronic form, follows.

SEQUENCE LISTING (136 sequences)

SEQ ID NO: 1 - DNA, 1668 bp, Bacillus subtilis
agctcggatccactagtaacggccgccagtgtgctggaattcgcccttagaaaggaggtgatccagccgcaccttccgatacggctaccttgttacgacttcaccccaatcatctgtcccaccttcggcggctggctccataaaggttacctcaccgacttcgggtgttacaaactctcgtggtgtgacgggcggtgtgtacaaggcccgggaacgtattcaccgcggcatgctgatccgcgattactagcgattccagcttcacgcagtcgagttgcagactgcgatccgaactgagaacagatttgtgrgattggcttaacctcgcggtttcgctgccctttgttctgtccattgtagcacgtgtgtagcccaggtcataaggggcatgatgatttgacgtcatccccaccttcctccggtttgtcaccggcagtcaccttagagtgcccaactgaatgctggcaactaagatcaagggttgcgctcgttgcgggacttaacccaacatctcacgacacgagctgacgacaaccatgcaccacctgtcactctgcccccgaaggggacgtcctatctctaggattgtcagaggatgtcaagacctggtaaggttcttcgcgttgcttcgaattaaaccacatgctccaccgcttgtgcgggcccccgtcaattcctttgagtttcagtcttgcgaccgtactccccaggcggagtgcttaatgcgttagctgcagcactaaaggggcggaaaccccctaacacttagcactcatcgtttacggcgtggactaccagggtatctaatcctgttcgctccccacgctttcgctcctcagcgtcagttacagaccagagagtcgccttcgccactggtgttcctccacatctctacgcatttcaccgctacacgtggaattccactctcctcttctgcactcaagttccccagtttccaatgaccctccccggttgagccgggggctttcacatcagacttaagaaaccgcctgcgagccctttacgcccaataattccggacaacgcttgccacctacgtattaccgcggctgctggcacgtagttagccgtggctttctggttaggtaccgtcaaggtgccgccctatttgaacggcacttgttcttccctaacaacagagctttacgatccgaaaaccttcatcactcacgcggcgttgctccgtcagactttcgtccattgcggaagattccctactgctgcctcccgtaggagtctgggccgtgtctcagtcccagtgtggccgatcaccctctcaggtcggctacgcatcgtcgccttggtgagccgttacctcaccaactagctaatgcgccgcgggtccatctgtaagtggtagccgaagccaccttttatgtctgaaccatgcggttcagacaaccatccggtattagccccggtttcccggagttatcccagtcttacaggcaggttacccacgtgttactcacccgtccgccgctaacatcagggagcaagctcccatctgtccgctcgacttgcatgtattaggcacgccgccagcgttcgtcctgagccatgaacaaactctaagggcgaattctgcagatatccatcacactggcggccgctcgagcatgcatctagagggcccaatcgccctat

SEQ ID NO: 2 - DNA, 1560394 bp, Bacillus subtilis
ctgtatggcggaatgaacgctgaggacataagcggcgccgtatgtgcggctgactgcgaaggtccgattgaagaccgttatgacgcctgcgcggcggagctgtcagcgatcgtcacgcgtcttatcaaagaaaaacagaagaaaaaaacgctgatccagcttcttgtccccgacaggggggaagacaatgtattggcggggctggccgctttcctgaaaacggctcaccttgaacatccgaagctgtacggccaagtcatccaagccgatccggacgagtcagcctcggcgcttcttgccaagctgaaagaaaaccgggcgcatcctgaacaagcggaaatccgttatgaagccggcaaacgtctcgtcagaaactggcgtcatctgccggcgcctcaaagcggcgccattccgtggaaagacgaaggggtctacctcctcacagggggagcgggcggcatcggcctgattgtcgctgaagaaatagccttccgcgtcaaaaacgccgtcctcgtattaacggggagggcggaagcgcttgatgaagaccgctccgcccgcttacggcgcttggaagcgtcgggtgcccgcgtactgtatcaaccggtagacgtgacagacagggcggcggtcatcgccctcgtccgcggcatacaggaggagcacggaacactcgacgggatcattcacggcgcaggcgtgatcgctgacaactacattctgaaccagacagaaaacgaacggaagaccgtcatggcgccgaaggtgaaagggcttatcaatcttgatgaagcagcgaaagatgtgcggctggactttttcatyctgttttcttccttggcgggaggtatgggaaatccggggcaggccggttatgcggcagccaacgcatttatggatgtttatgcagcccgccggaaccgtctcgtgcgggacaacaagcggagcgggcagactctgtctgtcaactggccgctttgggaagaaggcggtatgcgcgtggacaaagagaccgaacggctgatgtatgaacagaccggaatgagagccatgcgatcggcgtcaggcatccaagcgctttacgccgcttttgcctccggagaacaccaggtaatggtggcagaaggcgacgaaaaacggatccgcagccatattttcgatctgggggaagaacaaagcgccgccggacaagctccggcagtgacagatgcaacagatctgaaagatcaggttcaagagaaactaaagcggcatgtatcagatcttttaaaggtaagcatgaaagatatcgaggctgacagcgaactgacggaatacggatttgattcgatcattttcactgaatttacaaatctattaaatcggtcttaccagcttgagctcagcccgactatcttctttgaatttccgacattgcgcaaactgagcggccatttgatatctgaatggaaagaagcattcagcggcttagaaagagagcgtttaaaaaccgctccaaaagccggagtaagaaaagctgaagctccggcggccgttcatgtcaagcgggaaacgcccgtatccgtaaaaggaaaatcagaagaaaaaaccgaaccgatagccattatcggaatcagcggtatttttccgcaggcgaaagacatagatgaattctggactcgtttatcaaaaggagagcattgcatcacagaaattccccgagatcgctgggattggcgcgaatattacggcgatccggcagcggatgcaaataaaacgtcaattaaatggggcggtttcatagatggaatcgccgggtttgacccgctgtttttcgggatatctccgaaagaagctgaaatgatggatcctcagcagcgtctattaatgatgtatgtgtggaaagccattgaagacgcggggtactcagcaaaacggattgccggaacaaaaaccggcattttcaccggtacactgggaagcggatatcaaactttaatcaataaggcgggtcttcctgtcgaggggtatacgatgaccggaatcgtgccgtccgtcgggccgaaccggatgagttattttcttgatatccacgggccgagcgagccggtagaaaccgcttgttcaagctctttagtcgccattcaccgcgcggtaaaagccattgaaacgggagattgtgatatgggggtcgcagggggcgtcaacacgatcgtcacgcctgaagggcatatcggttttcaaaaagcaggcatgctcagtgaagacgggcgctgcaaaacattttccgatcaggctgacggttatgtcagaggagagggtgccggcatgattgtcttgaaaaagctttcagaggctgagcgtgacagggatcacatctacggcctcatccgcggtacagcggaaaatcacggcggacgctcagcgtcacttaccgcgccgaatccgcaggctcagacggatgtgctgaaaagcgcttatcaaaaagccggtattcacccgtcaaccatcacttatatagaagcgcacggaaccggaacggcactcggagatccgattgagatcaatgcattgaaaaaagctttccaaacagacggggcgccgggcggatattgcgggataggctcagtgaagacaaatatcggacatttggagctcgcagcaggtattgcgggcgttatcaaagtattgatgcagctgaaacatcggacgctcgccaaaagtctgcattgcgagaacatcaatccccatatcaaattgaaggacagcccgttttacattgtgacagaaacaaaggagtgggaagcgctgcgtgatgaaaacggccgggtcctgccccgccgggcgggtgtaagctcattcggtttcggaggtgtcaatgcgcatatcgttattgaagaatacatgggcagaagtgagacggaacagcaggaagcccgtgagaaagcgtcatctctttttgttttgtcggctaaaaatgaagagcggctgaaagaaagagcgcgtctccttcgcgactttatcaaaaacggatcatcccgccatatcgatcttgcagatgccgcatacacactgcagaccggacgggatgcgatggaagcgaggctgggaatcattgcaggctccgcagaggaactgactgaaaaactgaacgcgtttttgatgggaaaaaacagcgaagatatcatcagcggccgtaaaaaacgcgagaataacacgatctccatgttctcagacgataaagacgctgctgacctcgtcagcgcctggcttgagaaaaagaaatacaggaaagtgctgcggctctgggcaaacggatttgacacggattgggagcagctgtatacggacaggaagccgcgccgcatcagcctgccctcctatccgttcagagccgaccgctattgggtgccgaaacgggagcagctgccgctttcgaatcaaaaaacagtattattgcaaaaaacatgggaaccgtgcgaggcagtgtcttcatccgagccgttcaacaacaaaatagcgctcatcgtctctgaagatacaaaagaccttgccgccgaggtgaaaaaacagctgaatgatgctgacattgtgcaggaaaatcagctcatctctttcttacagggtccgaacgcggccatctattccgggtttattgacttcaccggctgcggctcccgacaaaagcggcaggacatcagctgggtggcatcgctgcagcagctgattgaatacggccgcggacaagaaaacatgaaaatgctttaccttacaaaagggcttgaagccttcaaaaataaggctgccgttatgcatggtattgaaaaagcggggctttatcgcatgctgcggaatgaatacagccatattctcacttgtcacgccgatattgatcctgaagggccgctggagcagacagccgcttttattaaacaagaaattcaatcagacttaacggagtctgctgtttgctatagggacggcatgcgcttcagctatgttcttcggcagactgatcagattgaaccagaagccgtgcaaacagaccggactgcgtttccaaaagacgccgtcctggtgataaccggaggaacgcgcggactcggcgcgttatgcgccaagcatttcgtttccgcatacggtgtgaagaaactgcttctgacaggcagaaaggagctgccgccgaaaaccgagtgggatcttgagcaaacagaccctgtcgtttcggaaaaaatacagcttatccggcagctggaatcacaaggcgtaaaagtgtgcgtctcagcagttgatctgacggataagcaggccgtcggacggcttataaaagaggtaacctcaacgctcggacctgtcggaggcattctgcattgcgcgggaattgcggaccgtgaaaaccctgcttttctccgcaaatccaaagacagtattgcgcgggtgctcgccccgaaagcagacggccttcacagtctgtatgagagtgtaaaggatggtgcgccggcatttttcgtcctgttttcatctgtctcggcagccgtcccgattcttgcgacgggtcagagcgattatgcgatggctaattcttacatggactattttgcagaaaacaatgagagcggtatcattagcatacaatggccggcatgggatgatacgggcatgagcagggatacaaaaagcgggatgtatcagcaaacgggattgctgcggcactctgacgcggaaggtctcaagatgcttgattacattttaagagaaagacccggagctgtcgtgctgccggcacaagtgaaacatgattgggacatcaaagcgctggaaaacgccaagccagccgccaataaaggaatgaaagcagcttccaaaccccctgaaaccaaaaaacgggaacataaccggattgatattcaatcttggctgaggtcgcttttggcaaaagagctgagtatcgatgaaacgcatatggatatcgatgtgccttttcaggaatacggaatggattctatctttctggcgcaagtgctgacaaagatcgatcaaaaactgccgtccgtttcaattgatccgactgtccttctggaacaccctaccatagaacagctcgcggattatttagccgcacattgtccggaagctttttcggcagatgcaacagttcccgcggagaaggtccctttgcagaagacgctgaaacggagcaaaaaaacggcagataaccccgggaaacggggaaaggttgcgatcatcggcatggcctgccattttccaaaagcgggggatataagagaattttggaagaatctccgcagcggaacggatgccgtcactgaagttccgccggacagatggaacgccggggaacactatcagccgggtgaatatcaagaaggaaaaagcatcagtaaatggggcggttttattcacgatattgatcaatttgatccggagtatttcaatatttcagaaacgctggcaccgatgatagacccgctgcaaaggcagtggctcgaagtgagcgcggaagctttggccgatgccggttatcaaaaagaggatctctggggccgccgtatcggcgtttttgccggtgcaagggcaggtgcgtttcatcagaaatttcaatatttgcaaaaagacgcgattattggcgcggggcaaaattttattaccgcacacatggcgcacatttataactttacagggcccaacctggtcgtggatacggcctgctccagttcgcttacggcaattcatttggccgtgcaggccattcaaaatggagaagcggaagcggcctttgcgggcggggttgacattttgcttgatgaaaaaccttttctcacaatgagcgcggcgagaatcttatcgccaaatggccgttcaaaatctttcgatgccgatgcggacggaacaggaatcggagagggctgcggtgtgctgatgctgaagccgctcgaaaaagcgatagaagacgaagataaaatatacggcgttattgacggctctgcgataaataatgacggcagcacaatgggcgtgacgacgccgaatccccgggcgcagcaggacttgattgagcaggcggttcaatcagcggaaatcgatccggacaccatgacatacgtagagacgcacggaaccggtacattgatcggcgacccgattgaattaaagggattaaccaatgtcttgtctgcttattccgatgaaaaacaattttgcggtgtaggaagcgtcaaaagcaatatcggccacttgctgagtgcggcgggcgcggcgggaatcatcaaagttttgctggcgattgccaatgaagaactgccgccgactttgcattgccataaaccgaacccccgcttccaatttaaagattctccgctttatcctgtgcttgagctgaagcggtggaacggaaaaaaagagatactcagggccggggtcagcgcgttcggtttgggcgggaataacgcccatatcattgtcagcaacgaaggaattccgaaagagcgaaaagcggccatggaaccgaaaggcggccagacagtataccgaaaacaacggtattggcctgaaaaagcacagttgtccgaagcggaagaaaatgaggcgggcacagaagcaatgtttgaaataagcgaggtgtgatagattggcagttgccaccgatcaagtcaaaacgttcctgcagaaaatcagccatacgaattatatcgtccgggatcatcgcgttcatcaaatccgcgtcctcccgggcgtgactttaatagatatgctgtatcggctcgccgccgggtatctcggtgaacggcctatagaattaagacagattatttttaagcagcctgttgtaacatctgaagagtttgataaacacctgtatgtgacctttacgccggcgcgtgacagctggaaagttgagattactagcgaaaaagcaaaaaacggcacaccgcttggcggaaaccgggatgagaatatggaatgccagctttatttgcaagaagacacgccgcgggcaaaagaactgaatattgaagcgttcatgaaaaacgcaagccgaaaatgggacatgcatgacatttatggaattgcaagaagaagccatattgagcatggcgagtttatgaaaaatgaaggggccgtttatcagcttcaggataaagaagaattaatggagcttactctgagtgatttggctgaaggattccgggagaaatttaaggcgcatccggcttttttggatgcgtccacccttgccggctcttcctttgcattgtcggcccaaaagcagaatgacacaccttatattccttttatgatcaatcgtttttgcatgtatcagccgtttccgaaaacgatttacacttattctgcgaaaaacagccgcactgaaagcggcgtatcagatagcgaacctgatgtttattcggccgacttcacgatttacgacagggcagggaacgtattggccgaatgtgagaaactgacagtaaaaagggtcagacaagcgaatatgattacccatctgatagacaaagagaagccgcctcagcagaacagaagcggccgtggtgagtcggaaaattctgtggccgcagaagacgtgtctgaacagcaaacgccggaacaaaacatggtgacttacataaagtcggaaatcgccaggctggtcaatcgtccggcacaggatattgatgtgaggaaaggcttttatgatatggggcttgactcggcgcatttgctgaagcttgtaaagatattagagcagacttttcagcagcagttttatccgacactgctttttgaatattcatctgtccgccgccttgcggattaccttatcaatgaagcgggctgtgtgctgaaagattcggcaaaagaacggcatacatcagacgctgacactgctgatgaggttctgttttttgaacccgcctggaaagatcatccgctggaaacggcggtgcagaactggcaaaaacacacccgtcatctcattatcgctgccgatgcaggaccccgtctcacaggtgaactcggcacatattgcccggaagcggaagtgatagaactgaaaagggagcatgaggctgcagatgagcagtttggagcagatgccgagcgcatatttcgtatgctcaaacgggaactgacagaccatccgaaagaacatacattgattcagcttgtatgcgccgttgagaatggagcggcattgtcatccgctctcggggctatgctgaaaacggcacatctggaaaatccagctcttcgcattcaggtcatcaccttctgtgaaaagaatgagagattgccaagtgagacggccgcaatcattagaacagaagcagactgctctcatgcaggatgtacagacattcggtataaagacaatatgcggcagatcagattgttcgaacgtattgagaaactggacgggcagacacagtctccttggaaacaaaacggcgtatatgtcattacaggaggcctcggcggtcttggatttctgcttgcccgtcaccttgcagaaaaagaaaaagtgaagctcgcactcatcggccgttcgccggaacagtctgagaagatcagcagactgaaagcattgggcgcagaagttctttacgttcaagcggacatcggcaataaagccgaaacagagcgggcatttgctcagattacagaaaccttcggccggctgacgggcatttttcattgcgccggtgttttaaaagatcaatttatcatccaaaaagacagttctgacttgaagggggtgttcctgcctaaaatcagcggcctgattcatgcggacgaagcttcacggaatgaaccgcttgaatttttcgccgtattttcctcattctcggcgttggccggaaatgccggccagacagattatgccgcagcgaacgcttttatggatgaatatatgaaatatcgcgatcgcaaagcggaaaaaggcgaacggaccggggcttctatgacgatcaactggccgctttgggaagatggcggcatgcaggttgacagcttgatgaaagagatcatgaatgctgcaacgggcaccagcccgcttccggccggggaagggatggcttcacttgaatatatgctgcgtctcggcaagctgcaatccgttattttatacgggaaggagcccgctgtaactgaaagcatggcccgattggttccgatggcagacaagaaccgctcttcattatcccatgcagctgtcaagagaaggagccgaaaacaagagagacatacagaagagcatgatattgcggtaatcggattggcgggaagatacccgcaggcgggaagcatcgaagaattttaccaaaatctgcgctctgggaaagactgcatcacaacaatgccgaaagacagatggaaaggttatcccttctcatatgaagcagatcagttctaccgttacggaggatttttagatcgtatagacagctttgatccgctgtttttcaatctgactcctcgccaggctgaaatgatggacccgcaggcgcggctgtttttagagacggcttgggaagcttgtgaagatgccggtttttatcaggacagaacggcgcgcgggccatcttcgcaaaagagaaaacgcgtcggggtattcgcaggtgtgttttggagccattatgagctgttcggggctgaaatcacacagcggggcacaccgctgtctatgggcgtgacgcctgcctctgttccgaatatcgtgtctcactgcctgaactttacgggaccgtcaatggctgttgatacgatgtgctcttcttcgctcacatccatacatttggcatgtgaaagcattaaaaggggggagtgcgaattcgcccttgccggcggtgtgaatgcggtcacacacccgcataagtatgcgtttttggcgaatgccggatttctgtcttcagaaggcgtctgcaaaagcttcgccgacggcggtgacggttatgtgccgggagaaggcgtcggcgcggtgttactgacaaccgttcaagaagcgcaaagaatgggctgtccgatatatggcgtcataaaaggctccgctttaaaccatgtcggaaaaacatccggtttgaccgtgcctgatccggcatcacaggcggaagtcattacagattcttttcggggtgccggcattgatccggagacactgagctatattgaagcccacggaacaggcacgtctctgggtgatccgattgaaattgaagggctgagccgcgctttccgcaaatggacaaacaagaagcggttttgcgccatcggctctgccaaatcaaatatcggccatttagaaggagcagccgggatcgccggattaacaaaggtgcttttgcagctgaagcatggagaaatctttccgtcattgcacgcggacacgctgaatccccatattccgtttccggacacgccgttttatgtggcggaccggctggaagaatgggaacggccgtcacattctgaccagccgagaagagcgggtttaagttcttttggcgccagcgggagcaatgcccattttgtcatagaagaatatctgccgccgcaggctgaaaagaaatcggtgaatatacgggaagacgagccggttctgtttctgctttcggcaaaaaatgaagaacgcctattagaatatgtcaaacggtatgaccgctttttacgggaaaaagaagtcaaccttaaagacctggcctacacgcttcaagctggcagagaagcgatgcctgaacggctggcatttatcgttacatccgtttgcggcctgcaagcgaagctgaaggatgtgcttgaacggaaaacagaaattgaaggatgtttccgcggacgtgctcaagatgatatttcatcaagtggaatggccgagctgctgaaaaacaagcaatattccagattgctcactgagtgggcaaaaggagccgccgttgactggagcctgttatacgaaggagagaagccgaaacgggtcagccttcctgtatatccgttcgcgaaggagcggtattgggtacctgtgcctgcggatatccggaaacagacagacgaaccggcggaaaaccaaaagatcattcttcaaaaagactggaagcagcaagatccggcggaatctgaagcattatcaggaacagtaatgatacttgcaactgataagacgagccgattggctgatgctctttttaaaggaaacggccatattgaaacgatctgcttcatccatcaggcaaaagacggcgccgattattatgccgccgcatcggggcgaaacctttacggcagagtgcgggagtctcttcaaaacaaacagatactcggggtcgtcgacataaccgcatatgacgcggaatatgaacggcaggaagagatagaacacggaaagcttgcctttttacagcaggctctggaatcactccgtcatagcggcgctgtgttcagccaagtgacacaccgcctccagcctttcaaggaaagtaaacctctgatgcaaggggcgaaaacggcggggctgtaccggatgctgggcgctgagtatgccaacattcattcttttacgatagatagcgattgtgagattgagcatacagaagaattaagcagacagattgagattgaatttttacagccgcgggccaaaagcgtcagtgaatgctgctacaggctgaatcgccgttatgtgccgtttctgaagcagggtatgaatgtttcggcggcgcctgagctttcctattcgtctgatgatgtgctgttaataacgggcggatcgcgcgggatcggcgcaattgcggcggagcatgccgtttcacgcggctgcaggaaactggtcatcatggggcgggagccgcttcccgattcctcagagtgggcagacatgaaaaaggacggcattctcccggaaaaagccgagcggatgcagaggttagccgagcggggcgcggagatccgttattacagcgtttctcttacggatcaaaagggactccggaacatgacggacggcatccgcggcacgatggggccgattaccggcgtttttcattgcgcgggtgcaatgggagaacaccccgctttttataacaaaaccgaaactgaaatcaaaagcgtttgcacaccgaaagtaacagggcttcgcggtctctatgaagccgttcagaatgagccgctgtcgttttttattttgttctcatccgtttcgggcctgatcccttcgcttgctgcggggcaaagtgactacgcgatggctaattcatttatggactcttttgcaaatcatcaagcaggtaaaggaaacgtgtttgttaaagccgttcaatggcccgtctggaaagaaatcggcatggctgaaggcctgccggaaacacctgcttatcaaaaatcaggactttccaggctgtctgctgaagacggactgaagtttttagattacatcatcttaaacggacaaagctgcggaattccttgtgttcccgaagacagtgagcctgattttggtgatcttctgaaggtgaagaaagctgaagctcccgtgaaaaaaagcactgccggtgaccaaaaggtgaaggacatgattcgtcaatgggtgcgcaccgttttcagcgaagaactgaaaatgacggatgagcagataaaagatgatatgccgtttgatgaatacgggattgactcaatactctttgcggaattggttcaatcattgcaaaaacggatcagcataaagttaacaccgtccttaatgcttcaatatcaaacgattacagaaatggttgactatttcgcagcgcatcatgaagccgattttgtgacaaaagaaaatggtttcgttcaagacggggacgtagagcctgatttagccgccgccgctgaagagagaacatccatgaagccgaaagcggatactgaagacgatattgccgtcgtcggcatatcctgccgttttccgggggcgggcggaacggatgctttttgggagctgctgatgaaagggaacaccgccattcggcctgtccccgcatcgcgctggcatgcaacagcaaatacaaaggattatgcggggtggattgatgatatcgacatgtttgatgcgggctttttcggcatctctgaaaaagacgcggcaattatggacccgcaggcgcggatcatattagaagaagcggttcattctgtttatgatgccgggtacggccaaaaggatttatcgggccggaaagtcggcgtgtacatcggcggcagggcgcagccttcagccggtatggaacatatcctgcaggcgcctaacccgattttgggggcgggacaaaactatttggcggccaacatttcacgatttttgaatgtcacagggccgagccttgtcgtggatacagcatgttcctcagggctgatcgggctgtcctttgcaaaagacgcccttttggccggaaggattgacgcggccttagtcggttcggtgagtctgctcttatctccgtccgcgcaccggttattcggagcgcgccatattttaaatgagaacggcgtgtttcatatattcgaccgtgaatcagcgggagaagtgctcggagaaggagcgggggcggtttttatcaaacgattgagcgatgcggtacgggacggagaccgtatttacggcgtcataaaagccgtctcggtaaacaatgacggccggacgctcggtcccggttcaccgaatataagagcgcagagagacgccattcaaactgcgcttgacatggcggaaaagtcgcccgaagacattggatatatagaagtgaacggaggcggttccccaatcgttgattcggtggaaatcaaggcgctctcagatgtctatcagctgaaccggaaaatgcttctgccctgccggatcggatcggtgaaaccgaatgtggggcatttgcttctgtcttcaggtcttgcgggcttcatccgatgtgtgctgagcgtctatcataagcggattccgcctttcttatcagcgcgtgagccatttgaacattatgactttgaagcgtcgcgtattcattttaatcgtgaacccgttgattggcattcagagaagaaacctcgcgtcgcagctcagagttcatttcctgacggcgggacaaatgctcatatcctcgttgaagaatacagaggtgaaaggcagcgggaacatcacctggcgcctcagccgccggaattcagaaaaaaacactacccgcttttgggcggctggaacagcacggagaatgaagcggaaaaaacaagtaatgaaaaaacagacattgcggatattttaaagaaatatgagaaaaaagcagagacaagcactgcacctgcagactcgttttggcaggtgacaacgtgacgtttttaaaaggggacgaaccatgaaaaaaacagtgaatctgcgcctgacggcagaacatcccattatgaaaaaccatcttgttcacggagaatctgtcatgcccggtctggcctatattgatatgctgtatcagctggcaaagcaaagccttgatctttcattccgttccatctgtctgaaacgggtgaccatttatcatcctttatcagtgaaacggtcagagcggcttgatgtgagtgtcatattcagtaaagaaaaggagttctggactgcctcgatttgcggggcggattccgggacggttttcttatcagcggaggtgcatgaaggggttttctcatcagataagcgccttgacgcggaagagaaaaaacaagttgcgcttccatcagtctccttgcatacggtttacgaagacgcgagaagccgcggactgtcgcatgacgggctgatgaagccggagggagagatctatgcaaatgaagaggaatgtttccttgatattcggcagtctgattcatgccaggaaaatctccccggcgctctctttcatcccgcgctgatggacggtgccgccatggcctccggcgtattgcagacagctgcaggcgccggtttgtttttaccgatttattatgattcgtttagtgccgctgaaaccgttacggagcgctgttacgcggtgatttcgaaaaaatccggcacgccttctgaaatggtgaaaatggatattgacttttacaaccccagcggtgcgcatattgcttcactgctcggcctgacagccaaaaaggtgcggacagaccggcagctgatatcaggcgttcagcagatggatgaaaccttataccgcattttttcaacatacgtaggccgtcctgtcacaagaaatgatgcgcacactgtgttttttgaattaggtcttgaatcgtcacagcttctggccattattaaagatatagaaggggcgtttgatctgcggctgaatccgactcttttatttgagtgcagcagcatatccgaactgcttgaagacataaaaacaaaaggaacagaagaatcttccggccttgtcgcggatgcagcaccggtctctgaaacgcaatcagtcagtcagacatttactttctatgaacatgaagcattccttcaggatcatctggttttcggcaaaccggcactgatgggtgtagtgtatccgtgtctggtgcttgaagcatccggagcgtctcattccggcacgtatcccgccgagctgaaagatatccgctttacgggcgggcccgtcacgctggagccgggagaggccgcacatattgacatttcatttgcaacagaaaagagtgccgaacgctttaccgcaagctgcactgtctccggtaaagaaagccggaagacgtgtgccgaaggagaaataagcagatatacagaggcacccgtaaaaaaatcgtatgacgttgaacaaatgaaggcgcatgcacaaaaggtagcgccggatgttatttcccgtctgtacgattcggttgccgacttcacgataggcccgatgctgaaaacggtaacggcgggatacaaaatgagtgagagctcctttttattgcagctggacttatcaggaaaaaaagaaaaaggcgatctgcgtcactttgcatttgacccgcttatattgaattcttgttatatgtcgctcggtgaagaagagttgcagctgaaaaagcggattcacgtcccgctcatgattgagaggctgacgctttacggaccagtcatgtctgataccgtctatgtggtgaatacaatcaaacataaaaaagacgggtttctctcatttgatgccgcagtcctcagtcataccggggaacagctggcggaattgaaaaacgcgtctgtgaaagaagtgcttcagccaaatcggcttgaaaatgcgtcttttgccccgtccgggaatcaaagccgtcaaaaaacgaaaggaaaaccgctggatattgccattgtcgggatttccggcaagtatccgcaggccgatgatatcaatgcgttttgggaaaatctcaaactaggaaaggattgtattaccgaaattccgaaagaccgctggaattgggaacattacttttccgaggaccggacggcgccgggagcgatctacagcaaatggggcggattcattgacgggatcgccgattttgatcctgagttctttaagatttccccccgtgaagcggaacaccttgatcctcaggaacgactgtttttaatgcatgcgtggatggccatggaggatgcgggatatacgaggacatcacctgaacttggccgtcaggtaggtgtgtatgccggtgtcatgtatcaggaatacccgctattcgcggctgaagcgggagtgaaaggacggcatatcgggctccccggcggtatttcatccattgctaaccgtgtctcctatttttgtgattttcaagggccgagcatttcgatcgatacgatgtgttcgggttcgctgacttcattgtacatggcgtgccgggatctgcgggatcatcggattcgcgcggcgcttgccggcggagtgaatctcaccgttcatcctaacaagtacttcatgctgagccaggggcagttcatctcatctaaaggacactgcgggagtttcggcgccgggggtgacggctatattccggcagaaggggtcggggtgctgcttcttaaacgtttagaagacgccgtacaagacggagatcggatttacggcgtcattaaaggagctgccattaatcacggcggaagagcgagcggttacaccgtaccgaaccccaaggcgcaaagcgaagtcatttctcaagctttacaggaggcgggggtatctccgggccagatcagctatgtggaagcgcacggaacagggacgaaattaggcgatccgattgaaatccgggctttaaccgatgcattcggtgatgttcctgaaacatgtctcatcgggtctgtcaaatcaaatatcggacatggggaatcggcagcgggcatcgccgctgtcacaaaagtgctgctgcagatgaagcacaaacaaatcgccccatctttgcatgcggatgttttaaatccgaatatccaatttgacgaagggccgttttccgtctgccgggaattaacagattggaaacggattgcagcagacggagaagaacagccgctcagggcgggggtcagcagctttggggcgggcggttctaacgcgcatatcattattgaagaatatgaggctcctgtcaaacaagcaatcagcagccaagagccggctgtcattctgctgtctgcgaaaaatggggagcgtctgacagaatatgcggagcgccttcttgcttttcttcaaaagaagcatacggataagccggacttatttgatgtcgcgtacactttacaagcggggcgggaagcgatggatgagcggctggctttcattgcggactcccttaaggagctggaggacaagctcagatcgtacttggaaaatgaaaacgcaccgcatctttacagggggcgggcgaagcgaaatcatgagacagtggctgtgtttgaatctgatgaagatttgcaggaagccatggttaaatggctgaaaaagagaaagtacggtcatttgctgaacatgtgggtgcagggagtcgatgtggactggaacttgttatattcgggacaaaaaccccggagaatcagccttcccgcctatccgtttgcaaaggtcagatgctggattcaagatgaagccgaggcggtttcaaaaagggatgacggcaaaacggtgatccatccgctgcttcatgaaaatacatccgatctgtgggagctgaaattcacatccgtttttaccggacgggaattctttttcactgaccacacagtcaatggacagaaggtgctcccgggagccgccgtgatcgaaatggccagggcggccgttgagcgtgccgcatacgctgtgccggacggacgtaaaggaatgtatttgaaagatctcatatggatgaggcctgtcgttcataaggggacggatgtagaagtccatatcagccttatccttaagggaaatgaagacattgaatttacgatttacagcctatcggaagaacccgggggagaacggattatatacagtaaaggcaccgcggtatcaggagagatagcagcggttccgtcagttcacttagagggctggctgtccggctgcagccaatcggttatgacgtctgatgaggtttatcaggctttccggcatgcgggtatgatatacgggccgagccatcaaggaattgatcagctgatgatcggagagaggggtgctgcagcccggctgtcgctgccggaatcggcagacagtaccgccgatcagtttgtcatccatccgagtcttttagatgccgcgtttcaggcgtcactgggtgccggttcagatactgtcggagacactccgatgctgccgttttccctgcggcaggcagaaatatttcagccgactcagaaaacgatgtgggcgcttgtccgcaaacagagcgatcggtcagataacggagcgctgacgctggatattgatttatgtgatgaaaacggcgctgtttgcatgagattaacaggattttcctgccgggcggtccggcagacagaccaaaccgaaagcaaacggcaggaagttcagacggcgatgcttgcccctatttgggataaaactttcttttctctggaagaaaatcgagcggttgatcaagaacaattgctgatcatcggaaagccgggaaataccataaaggctgcggcaaaaatgtggccccgcgcccatctggcggagacgccggatcattcaagcgagcaaacattacgtgaattgacagccggatatcaggatatccgccatttcttatggattgcgccggatcgtttcgcacccgcatccgtcagtcaggaaatgcttgatgagcaggagaatggggtgattcaatgtttccgtttcatcaaagcgctgctgtcaatcgggtatggaaaccgaaacatcagctttacggcggtgacccggcagacacagtccgtgtatccgggtgatctgccgcagcctgagcatgcaggcgtacacggtttgatcggttcattggcaaaagaatatccgaactgggacatcaggctgattgatgcagaagaaggcagtgattcgtctgaaatgaaagacatctggcgcctccctccagatccggacggaaatgctgccgcgtaccgtaacggagcttggcacaagcaaaaaacagtccgggtgctgacaagttccgctccgcgtatgtcgtacagagaaggcggcgtttatgctgtcatcggcggagcgggcggcatcggagaagcatggagcaaatacatgatcacccgttataaggcacggatgatatggatcggcaggcggccgaaggatcaggagattcagagcaaaatagacaggctggcgctatcaggccccgcgccgcattatatacaggctgatgctcaagatgccgtagcgcttaaagcggccgtccgttccgtaagagagcaatacggcaatataacgggagtcatccattccgcgataacgcttgccgacaaaagtatggcgaatatggatgaagcttctttcagaaacgcttattcagctaaggtgaatacgagcgtccgaatgatcgaagcttttaaggaagaaccgcttgattttgtgctgtttttctcatccgttaattctttcacaaaaaatgccgggcaaagcaactatgcggcagggtgtacatttcaagacgcctttgcccgccatatcgcttccttgcttgattgtgaagtgaaagtcatgaattggggatattggggcagtctgggtgttgtatcagacccgtcttacagaaaacggatggaggcgtcagggatcggttctattgaacccgatgaagcaatggaggcgctggaagtcttactatcagaaccgttcagccaagcggcattcatcaaagctgctccgcacggcttagccgagctgacggatcaagatgcaatatcggttgtatccggcccgaagccttcatttatggaaagcgtcaagcggcaaaatccggatcggaatgaacggcttgagactttaaaacgagaaatggagttgcgcatatgaacagccttctttgcaaactgctcttttaccaattacagtcaatcggttttttcagcgagcctgtcactacacctgcagcatccatgcggagcgccggcgtgatcggcacatacggcagatggctggaagaaagcctgaatctattaaaagaaaacggatatatcgcgtatgacggatacacggtcactcttctcacggatcagcgcccggacggccgcacagtctggaatgagtggaatacccataaacgcctgcttcccaatggggagcttgcgcaagctgaattggccgaggcgacgataaaagcgatgccttccattttaaaaggagaacgtccggctacggatatcgtatttcccgattcatcaatgcggctcgttgaaggtgtttataagcataatcctgtcgcggattattttaatgaagtgttagcagattccgcggccgcttacctgaaagcctatcttacagaacaccccgatgcccgtatcaggctgatagaagtaggggccgggacgggcggaacgagcgccatgctgtttacaaaactgaaaccatttgcaaaacagattgcggaatattgttatacggacgtttctaaagcttttttaatgcatgccgaacaggaatacggagctgatgtgccgtatttgacaacagccttgtttaatgcggaggagccttgcgaatcacaaaatatcaaaacgggtgtttacgatattgtcatcgccgccaatgtgcttcacgccacaaaaaatatcggtttgacactgcgccgtctgaaagcgctcctgaaatacaacgggatggttttgataaacgaaatcagcgatcgttctgtttttacccatttaaccttcgggctgcttgagggctggtggtcctatgaggatgctgagcttcggattccgggaagtcccggcttatatccaaaatcgtgggagcgtgtgctgcattcggaaggatacagagcggtttgtttccctgctgaaacggctcatgatttaggccagcagattatcgcagctgagagtgacggactcgttcggatgcaagggatcagagacggcagaaagccatacgccgccccggccgaagttttccgaaagcccgcgcagcctgtttcccgcagccgcgcgccagaggagcatcaagctgttaaggctgatggggaatcggtctcttcccatgtccgctctgtcatcaaaacaagtattgccgatgtattaaaaatgaaagaagaggatattcaggaagaactgaatttctctgaatacggcattgattccattctggccgtcaatgtgattaacgagattaataagcgattgaatcttacactgcagacaacgattttatttgattactatcatgtgaaactgctgaccggttatatctcggaagaatacgaaaccatcatagcctcgtctctgaagaccgatagagcgaaaatccgcccggcgcttcaggaagaacggcctgctgaaaaacctctgcagacggaaagaaaggaaaacggttatcagaaaccgaaacaagaacgtatgccgccttctttcgcaaagtccgatgactcgggaatgttccgggttgtgattgaccgtccgggcggcattgaagatctgacgattgcccgcagtgaagtgcccgagacaaaagatgacgaggttcaaatagccgtccgcgccttttctttaaacttcggagacttgctttgtatcagagggctgtacccgacgatgccgccttatccgttcactccgggatttgaagcaagcggcgtcgtgatcaagacagggaggcatgtaacatccgtcattccaggtgatgaagtgattgtcggcatgggagaggaatttggatctcaggcgaatctcatcacatgtaaagaacatcaagtctatcataaaccggcccggctgacctttgaagaagcatgcgctcttcccaccgtggcggtgaccatgatagacgccttccggaaagccggacttaaaaaaggcgaaaaaatattaattcagaccgcgacgggaggaacggggctgatcgcggtgcaaatggcccggcatatcggcgcggaaatatatgccacggccggatcacagaaaaaaattgagtatttgcattcgctcggggtccgcaataccatctgctatttagaagaagattttgaaacggaaatcatgcgaatgaccggcggccgtggggtggatgttgtcattaataccctggccggtgatgccttgcaaaaaggaatgaattgcctggcgccgggcggaagatatatcgaaattgccatgactgcgctgaaatccgctaaatcagtcgacttgtccgtccttcataacaatcaatcgtttcacagcgtggatttgcggaagctgtcccttcaaaatccggaccaggtcaaggactatcaattggaactgcagcggctggcggaagagggagtcattcagcctgtcatctcaaaaatcttttcctttgaagacataaaagaagcgtatcactgtctggatgaccgcggaaatatcgggaaaatcgtcatcagcgtttctgaaccgtatcaaatgacgtaccgccccgaacaaaaggatccggccgatacagtaaaatcagcagctgtgttacctgaaaaagaaccgatcgcgattatcgggatgagcgggcggtttgctgaatcggagaatctccatgagttttgggaacacttagccgccggacgggatctgattaaaaaagcagacagatgggatatctctgacagccaatgccagtatggcagttttatagaggacattgaatgttttgaccccgttttctttcatatatcgggacgtgaagcgacctatatggaccctcagcagcgggtgtttttggaagaatcatggaaagcgcttgaagatgcgggatatgcgggagactcggtaagaggccgggaatgcggcgtgtatgccggctcctgcggcggagattaccaggccatttttaaacagcaggggcccgcgcaggctttttggggcaatcacaattccgtcactccggcaaggatcgcctatcaccttaatttacaagggccggcgatcactgttgatacagcatgttccagttcactgacagccattcatttggcatgtcaggggctctggacgaaagaaacggaaatggcggtggcgggcggggttttcattcaatccactcccgctttttatcagtcgtcaaataaggcgaatatgctgtcaccgaccggacgctgccatacgtttgatcaaagcgcggacgggttcgtgccgggtgaaggcgtgggagcggtggtgctgaaacgtcttagcgacgccgttagtgacggagatcatgtgtacggcgtcataaaaggatctgcaatgaatcaggacggcgctacaaacggaatcaccgctccaagcgcgctttctcaagaacgattggaacgtcatgtctatgatacttttcacattgatccggaaaccattcaaatggtggaagctcacggaacgggcactgcactgggcgacccgatcgaattcggcgccttaacgcgcgctttccgccgctatacggataaaaaaggatattgcgccatcggctctgtgaaaaccaatctcggacatgccgctgcggccgcggggatggccggactgtttaaaatcctgctgtcgctgaagcatcggcagattccggcttccctgcattttcaccaagccaatcagcatattcaatttgcggacagcccgttttttgtgaatgaaaagctgataccgtgggaacggaatccggatacaccgcgcagagccgccatcagttcattcggattcagcggaacaaatgcccatcttgtgattgaagaggcgccgcaaaccgtgcgccggtcgccggcaaaaccggcctgcctcattcctttatctgcgcggacggagcgtcagctggaaattcaggcagaacgcctgctggattcactcagcaagaacaaagacagcgatctgggaaatataagttatacgctcctgctcggcagaaagcatttacatcaccggtttgcctgtatcgtaagcagtgcggacgaactgaagcgggtattatcggagtggcttgtaaaaagagagcttccgggtgtgtttgtgtccaatttgaaggatcagaagccggcagaagaagccggaatgaaaacattcggaatggaatgcattgaacagtgccgctcggcagcttcgcccgcgcagtacagagaaagcctggcacatatcgctgaccttttttgcagagggtatgatcttccttttacacggctttttgacggagggcaatattataaaacgccgcttcctgcctacccgtttttaaaagaaaggtattgggcggctgatgtaaacagttctttaccaggccaatccatgaaaaagtctgaaacgcaaaccgttctcccgtcttcgccgcagcctgaccatgaagggctgatttctctgagtcctttaactgagatcgaaatgagagcgtttgaaccggagacattgcaaaaaccgatcgtgttacagcctttggattgtactgtttctgtccagcagccgaaaaaagccgtttccgaagacaatagaacattgcttgaagagttgaggataagcctggcagatattttatttttgtcaccggaagatattgatgctgatgagcctttcatcgatatggggcttgactccattatcggggttgaatggatacaaacagtaaataaaacgtaccacactgagattactgccaataaggtgtatgaacacccgacgcttgaagagcttgcggaatatatagcggggcaaataaagaaatccgagtatgctgaagcggaggaaacagcggtacgtccgcaaatcccggaagcagaaactccccttgccggcatctctgacggcactttgcgcaaagagcttaaagaaagccttgcggacatcctgtttctgaagccggaagatattgatgagcatgaggcattcattgacatggggctggattctattatcggtgtggaatgggttcagtctattaataaaacgtatcaagcgtctattacggcaaatctggtctatgaatatccgacaatcgcaacattagccgggtatctgaccggttccgttcaaaaagacactgaggaagtacatgaggaacatacgaaacaaaacgatatatcagaagagacagatgatcaagaaccgcccgaactgatctgtcttaacccggggggaaagggaagaccgattttctggtttcattccgcgctgggggcagtggagctgtaccagcctgttgccgaacggaccgggcgtcctttttacggaattcaggcaagaggatggatgacagaccgggaaccgatccgcggcattaaaaacatggcggaatattacgttaagctcatacgtaccgtgcagccccggggtccttacgatgtaggcggctattcattagggggcatgctcgcttatgaagtcacccggcaattgcagctggctggagaaaccgttgagtcaatcgtcatgctcgactcctttgactcggcgggtgcgcgggaaataaacattcctgatgaattatttgataaaaatatgatgctgcagacggtgaacatggctttatttgcaccgatctatcaacatccggaacgcatttctgaaaccttgattcaccgtgatgaactagatgccgatcttcatgaagacatatttttagagcaattaatcgcaaaagccaaacagcgggggttaacgaagacggacgcgttggtgaaaaatctgatcaggcagaatataaacgttcaggacgcttacgaaatcactgattacgaactcctgccgcttccggatccgaacggggtgacatgctattatttccgaaataaaaacggtattttcttgggtgagcttgatccgttttttacgatcagggccgatattttatccgctgatttcgtcaactactggagccagtgggaagagcatatgacaaacatcgccatcatggatgtggcggtatccaaccatatgacgttattggctgaagacagcgcagccgaaacgatttctgaattttgcggcgttttatattcggcagacggaatgacagaacacagcttcctgcagctgcaggaaaagatactgaatgtgcatggtgagatgctgaagcagcccgccaaaacaagaccgtaaattcacatatccgcccgccgggtttactcgtaagctttggcgggtcatttcaaatcttgatcacatcttggaggaatgaaaatgaccagtttaacaaaaatcagacagcagcagccgtacaagtggtaccaaacgatgagagaaacctctcccgttcattacaatgaaaaggaagattgctgggaaatcttcacctatgatgaagtgaagcgggtgatttctgactacagtcatttttcttccgatcataaatacttaagtgcggacaagcaggaaaaaatgatccggcatattaacaaagacagccttttgaaaatggacccgcccgaacacaccgtcttcagaaaattggtcaatcagccgttcatgccgaaatcggttgagtctcttgcaccgcgtatagccgctatcgctgatgacctgcttcaggccgtccgttcaaaaggcaggatggacattattgaagattacgcatttccgcttccgattatcgtgatcgcagagcttttaggattccctccgaaagacagagatatctttaaaagctgggtcgaccaaagccagaatgtaaaagatgaaaagaaaatgaatgaagtgcaaaagcagatgatcggatatttcatgcagtttattttacagcggagaaaacagccgcaaaatgatttaatcagccatttaatttcagctgatttagacggagagccgctgtcagacaagcaattaatcggtttttgcggcttgttgatcgtcgcggggcacgtaacgacggaaaatgtgatcggaaattcatttctcagtctcaaggagttcccgcacattctgccccggctgcttgaaaacaaggcgctccttcctgactttattgaggaagtcatccgcctcagaccttccattcagcgggtaacccgctacactgcggttgagagcgagattggcggaaaaacgattccggccggagaaaaagtgtatgcgtggattggatcagcgaacagagatgaaaagaagtttgaaaatgccgatcagattgacttgggacgaaagccgaatcagcatctgtcattcggtcagggcagccattattgtttaggagcgccgctggcccggcttgaagcgaaaatcgcgctttcccacttttttgaacagatgtccgcatggcgttttactgaggatcaagagccgaatctggttccgagccctgtatttcacggcgttgacaggctgcttgttgagttttgaacggaaaaataaaagaggcttccacaggaagcctctttactctgggggcttggagaaatgaatgtaggaatcgaagcaatgaacgtgtttggcggaaccgcgtatgtagacgtcatggagcttgcggaacatcggaacttggataaaaaaaggtttgagaacctgctgatgaaagaaaaagtggtggcgcttccgtttgaagatccgattacgttcgccgtaaatgccgcaaaaccgattatcgactctctgtcagaagaggaacggaatcagattgaaatggtcatcacctgtacggaatccgggattgattttggcaaatccatcagtacatatgtccatgattatttgcagctgaagcggaattgccggttatttgaggtgaaacaggcttgctattctttaacggccgggtttcaaatgggcgtgaatttcatcttatcgcaaacatcgccgggagcgaaagcgctcatcatcggaacggatatttcccgctttttagtggctgaaggcggtgacgcgttgacggaggaatggtcctatgccgaaccgagtgcgggggcgggagctgtggcgcttttagtcagcagcacccctcatgtctttttgcttgatcaaggcgcaagcgggtattacgggtatgaagtcatggatacgtgccgcccgattccggatagtgaagcgggggatgctgatctgtcgctcatgtcttatttggactgctgtgaaaaatcatttcaggaataccgaaagcgtgtgagcggggcggattataagaatacatttcaatacctttcttttcatactccgtttggcggaatggtaaaaggagcgcatcggacgatgatgagaaaattggcaaaggctaagccgcaagacattgaggcggattttcagcaacgcgtgctgcctgggattcaatactgtcagcgcgtcggcaacatcatgggggccaccgtatttttatctcttgccagcacgattgataacggctcttttgatacgccgaaacgagtcggctgtttttcatacggttcgggctgctgctctgaattttacagcggtgtcgttatgccgcaaagccgtacacggcagaatcaatttcagatcagccggcatttggatgaacgcgtccgtttatcgatggctgattatgaccggctgctccaagacagcggcatcgtaaaattcggcacaagaaatgccgcgcccgcagcagacatcccgaatgcgcatcaaggaaaaacgcgattggtgctgactgaaataaaagagtttcacagaaagtatgaatggacgacttaatatcagaaacactcagagccggaaaggcttgagtatttttaaagaaacggagaataaacatgaatccaatgattgatgtacaggaaacagaaccgggcattgtgcaggtcacaatgcaggatacggcagggaaaaacgggctgtcagaagagtttgtcagagagctgcaccgggtattccaagacatcaatgcccatccgtcctataaaaccgtccttctgacgggttacggaaattatttctgcaccggaggaacgcaggaggggcttttgaccattcagagcggaaagcttcaatttacagatttaaagcttcatagtcttttattggattgcaggattcccgtgatttctgccatgcaggggcatgcgatcggagccggctttacaatcggtctgagctcggatttcgtgattttaagcagagagagtttttattcttgtaattatatgaagtacggatttacaccgggaatgggcgcgacgtatattgtgcctgaaaaactgggaattgtcctcggggaagaaatgctgtttacggccgcgaatttcagcggcgccgctctggaaaaacggggagttccgtttgaagtgctgccgaaaaaagacgtccttcaaagaggccgcgaattggcccggctgctggcggataaaccgagagcctcactggttgcgctgaaaaccaatgtgaccgcacggatcaaaagagagctgacaaaagcggttgaggaagaggtgaacatgcacgaagccacattccatcttcctgaagtaaaagagagaatcagccgcttatacggcagttaaacagaatgaaaaaagcatgggaagccccatgctttatcactggtccgtcttttgcagaacggagcctgcgaattgttctttaatttcggcgctccgggctgcggtttctgcgatgcagtgcatgatggcttcttcaaagcggcgctcttctaatgcgcgaaggcctgcttcagtcgtgccgcccgggcttgtgatttccttgcgcaggcgttcaggccgtttgctgcttgttctgagcatttccgtcgccccggccatggtttgtaaaatcagctcttttgccgtttcttccggcaggccggcttgaagggcggccttttccattgcttcgacataccggtacacataggcgggaccgcttccggcaatggctgtgacggcgtcaaggtgtttttcttcaaagcgcgtcgcttctccgattgtttccagaagctcttttgccgtccggatttcagcttcactcgcctcggagcttgcggaaaaaccggtcgccgattgctgaatggccgcggatgtattcggcatcgcccggatgatggtgagctttctgccgaaatattgctgaatcgtgtgaatcgtcagccctgcgatgacagaaatcacaagctgatctttcacgtattcgcgaatgttctcaatgctttctgccgcatctttcggtttaaaggcgagaacgagaatgtcggtattgctgaaaaactcttctttatcccggcacggttttactccgtacgttttttggagctcttcaagccggctgtcatttgaccggtttgtcatatatatatgtccgggggctgtcattccgctttgcagcagtccgttcaccattgcttccgccattgatccggccccgataaaaccgattttcttcatataaatcctccttcttctcaaaacacaaaaaaaccttcccgtcaaaaaggacgaaaaggtttcgcggtaccaccttacattagcacgaatcagccgtgctcagctcaaatcccgtaacgaggggatacgtttaggttttcctaaccgctctgagggcaggttctgtaaacaagagggccgcaatgtctttcagccggggacattgctctctgctgccgttgtttatatactagttcctcgtcatcgcgttccgtgttttctagtttgttgttcattatgctatgcgcaagagcgggatgtcaatctttttttccgatatgcggcaataatgacacagtgaaaagaaaacgctaaaatatgattattcaggaatgaaaagaacgaaggagcgtaaacatggcagcgagaaagatcattccgatacgtgtgccgactccgtttgcagtcggcgacgttatcgtttatttagtaaaagatgaagccttaacccttattgattgcggcccgaatacaaaggaagcggctgaatcgctctcattgcagcttaaggaacacggggtttctgcggcggatatagaacaggtggtgctcactcatcatcacgcagatcattcaggtctgctgcaccttttttccgacgatgcggaagtaatagggcatccgctgaatgacaggtacattactcaggatcagtcgtatatcgcccggcaggaggacttttttctgtcgcttatgactgaaatggacgttcccctgacgcctgaagacatacataaaacagttaagctgtcatacttattttctgcaaaccgtccgttaacgaaaacagtgagggaaggcggaaaaattgacgggcttaacggctggacggtgctcgaaatcccgggtcatgccgcttctcacattgcgctctaccatgaaaaaagcggtgaaatgttcagcggcgatctgcttttgtccaacagctccaccaatccgattctggaagctccggaaaaggggggcgtgcgcgcggccccgatgctcgactacttgaactcaatgaagcggctgtatgacgtaaacccgtcctttttatatccgggacacggcgatctgctgacagacgtaaagcctgcttttgacaggcggcttgaaaaacagagaaaccggtcggaatatgtgctgcgcctgttgtcagaggaaacgctgacggctttccaggtatgccggcggctgtttccggctgtgtatgaaaatgaattgtttttaacgatgtcagaaacgatcggccatcttgacgtgctggccgccgaagggaaggctgtatcctttcagtcggggaacactctgaagtttaaagctgtgaaggggtgaaggaaatgggcagattaacggataagcggatttggatcaccggagcatccggcggactcggagaacggcttgcatattcctgcgcggcagaaggggctcatgtttttttatccgccaggcgggaggaccgcttgcaggaagtgaaaaagacgattaccgcgcgcggcggacagtgtgatgtcgttccgtttgacgtccggcatgcagaagaggctgaaaacgtaaggcgtttgatcggtcatgttgacgtattaatcaacaacgccggcttcggcatttttgaaacggccgctgattcatctttggatgatatgaaggcaatgtttgaagtcaacgtcttcggattaatcgcctgtacgaaggcctgtcttcctgtgatgcttcatgcgaaaagcggccatattatcaatatcgcctcacaggccggcaaattggcgacgccgaaatcaagcctttattccgcaacgaagcacgccgtgttagggtattccaatgcgttgcggcttgagctggacggtacgggtgtagctgtgacaacggttaatcccggtccgatcaaaacagacttctttacaattgcagataaagagggcggttatgtgaaaagcgtcggcagatggatgcttgatgccgaccatgtggcagagcgtattacatccgtgattctgacggataaacgggaaatgaatcttccgcgatggatgagcctcgggacgaagctgtatcagcttttcccatcgtttacagaaaaactggccggccgcgcattaaagaaaaagtaacaagggggaaaaaggaatgtccgaccgggatatacacaaggcattgatggcagagcctctagtcaggcaaatggcggaggcgcgtgaagtattttggatcaatccgcataaaaccgatgatccggtaaagcatggcgctgaatggaaaaaggagattgccgaagcggaagaaaggctgcgccggtttgcgccttatatcgcgtcggcttttccggagacggaagcggagggaggcctcattgaatctccgcttgtcttgattaatgaaatgaagaagcatctggaacacagcgccgctcaggctttccccgggcgtctgcttttgaaatgcgacgacgaacttccgatttccggttccattaaagcgcgcggcgggatttacgaagtgctgaagcatgccgaagatctcgcggtaaaagcgggaatgctctcagcagacgacgattacagcatattgactgaagaacggtttaccgcttttttctcaaaatactctatagccgtcggctctacgggcaatttaggtctgagtatcggcataatcggcgcgaagctcggcttttgtgtgaccgttcatatgtccagtgacgcaaagcagtggaaaaaggagctgctccgggaaaagggggttcgcgtcatcgaatatgaagcagactacagtctggctgtcaaagaggggcgcatgcaggcgaagcaggacccttattgttattttattgatgatgagcattcccgggatctgtttttggggtatgccgttgcgggaagccgtgtgaaaaagcagctcgaccaaatgaacataaagcctgatgcagatgaaccgcttttcgtttatttgccgtgcggggtcggaggaggcccgggcggcgtcgcgcttgcgctaaagctgatctatggcgagcatgtccatatttttttcggtgagccgacgcattcaccgtgtatgctgttaggactgttttccggcttgcatgacggaatcagcgtgcaggatatcggtcttgataatcaaacggccgccgacggactcgcggtgggaaggccgtccggactagccggccctctgatggagcctataatcagcggctgttataccgccgatgacggcacgcttttttcgctgctttatcaattaagggcggccgagaataagagccttgaaccctctgcactcgccggactggccggagccgtcaaggtcgttcagaccgaagccggaaaccgttatataaaagagcgggggcttgagatggaaaatgccgtgcaccttgtgtggagcaccggcggaagcatggttccggaggaggaaatggaagagtacagccggatcggttcctcatttttgaaaaaaatgggcagacagtgaagcggttttccgttacaatctttgtaagcgtttgtttttttatcggaaagccatacagagagattggtgtgaattgtgaaaagtaaagaattgaacttacatacattgtatacgcagcacagccgcgagtcgtgggccggattcggcggccatctttccattgccgtttcagaggaagaagccaaggccgtagaggggctgaatgactacctgtcggtggacgaagtagaaacgatttacattccgcttgtgcgcctgctccatcttcatgtcacgtctgccgcaagacggaatcagcatgtcaatgtgtttctgaagcatccgcattcagcgaaaatcccgtttatcatcggaatcgcgggcagtgtcgccgtcggcaaaagcacgacggcgagaattttgcaaaagcttctttcccgtctgccggacaggccgaaggtgagcctggtgacaaccgacggtttcttgtatccgacggcggaattaaaaaggaaaaaccttctgtccagaaagggattcccggaaagctacgacgtgaaagcgctgcttgagtttctgaacgatataaagtcggggaaagagagagtggaggcgcccgtatattcccatcttacgtatgacagggaagagggcgccgtcgaggttgtcgaaggtgcggatatcgttattatcgaaggaatcaatgtcctgcagtcgccgaccttagaggacgacagggaagatccgcggatttttgtatcggatttctttgatttttcgatctatgtggatgccgaagaaagccggattttcacgtggtatttggagcgtttccgcctcttaagagaaaccgcttttcaggatccggcttcttattttcataaatttaaggatttgtctgatgcagaagcggataccatggccgcctccatttgggagagcgtcaaccgtccgaatctgtatgaaaatattctgccgacaaaattcagatcggatttgattttgagaaaaggtgacggccataaagttgaagaggtgctggtaaggcgggtgtgatgtgaggaggaagcgaatattatgatacaccatattgagttgtatgtatctgacttgaaagcctccgcccggttttggggatggtttttaggtgagctcggttatagggaatttcaaaattgggactccggcatcagctggaaaaacgcaggattttatgttgtgcttgtacagacagaggagcgttttttaacaccggagtaccatagatgccgggtcgggctgaaccatctggcttttcatgctgcatcaagagagcaggttgacgagatgacagaaaagctgcttgccagaggatgccccgtgctttacagggaccgccatccatatgcaggcggaagcacgcattacgccgtatacacggaggacccggatcggataaaagtggagctcgttgctcctgcttctgaatgaactataacttttcgtttttttcttcgcgcagcgcgtcgagtttcttttcgattctgtccaattgtatgcggcgcttgttcaagcttctgaatacgtatatcacggcaaacaggaaaaatgcggctgcagtaaatgaaatcaattgaaaaatgacatcaccgatgttcatcttttttacctccgtgtgcggcgggcttcttcagcccgccgttttttcattttgaccgatatgaagacatgggggatgaatcatttctctcctagctttgtttttttctgagaatgaatagtttctgcatgtggcttatgaccacttttgcggccgcatatcccggaatggccagaagcatcccggcaattcctgagaatttgccggcggcaagcagaagaaaaataatggtcagcgggtgaatgtccagcttccgtcccataatttgcggggaaatcagctggctttcaagctgctggacaatgacgacgaccgtaatcaccagcaccgcctcggtcggtgaatcgaacaatccgacaatgactccgggaaatgtgccgatccaaggcccgataaacggaatcaggtttgtcaccatggcgaacgcgcccagaacgagcggataatcgagcccgattataaaatagccgatcgtgacgagaacgccgacacagaaactgacgagcagctgtccttgtatgtatgaactgagagcttcatccatatcccgaaggatttgttttccttctttttgatgtttttccggaagaagccgcagcagtcgccgaggggctttgtttccttcttttaacatgtaatacagcgcaaacggaataatggcggcggtgatggcggcattggcagccgtaccggccaggctgctgagagaatcagcgattgaaccggaataatttgcggctttgtccgctaattttttaaaggaatccccatgctgaagccgggaaaaccatttgctgtcctggagatgcccgatccaattttcagcttttgcggaaagctccggaatatgatctgtgaaggctgtaaactgtttttgaacggcagggcccgccgtataaaggaagaggacaaaaaggccggctgttcccgcataaatcgctaaaatcgcgattccttcgggcagctttaatttcgtatgcagcactctgacgagcgggcggcacaaatagtaaaggacgcccgataatacaatgggcggaaacaaggttttaaccgtaatcacaacaggctggaacaaaaagtctattaatgttccgagataaatgatgagaaataacagaagaacggcatagccgatcctgaaataaggcccgacaggcatatcctgcaccacgcaatctttaagggtttactctcggacatttcccttatcgcccggtgcataaacgtccgtgtcaggaaaactgcccttgattggtgacgtaatcgtagataatatcttctacatgggcatggagatcctcatcgggttcttcattccttctttcttctaaagctttttttaaactctgtttttcataggggctcagcggatctgtcgacacattccgtccatactggcggagggcttgtcccagcattttttctataaattgatccatcatatattctcctattcttgtcattcatctttattctactaaatatcatgtgatcctcccactcttctatcatattttctgtcaggacgatttaggcttttattccagttcagccgagagaatacgatgaaacggcagcgttaacgcatcttcatcgtttatgatttttaaacgcttttcgtcatgcatcacttgttttacccagccccaaaagcggcgggggccgtgtgcggaagcgtaggtgaccgaaatggccctgtcttcttcaatcgacgccgcaatgatgcggttcatgtcgttcagttgctcttcgctcagttccggaggccggaattcccgttcttttcgttttttcgcaagcagctgctcccgatgttcgggcagcatcatccggcttgattcccacatgacattatacccgggtgttaatttgttcggattcatgtatatcacctcaaattatttgtaatgcccgccgattttttcagcccggtgaaaggcttggccggcctctgtcagtgaagcggcatggaggagcgacgcagggccgtaccgctcatgaatatcatccaatactttgccgagactgatctttttttcctgggcatcgaacaggctcagctgaacataatcacaaggctccagctgggaaagggagacgccggcgctgcggacgggcgcaccgttccaatgctctttgaagagcttgaccgccgttttaaaaatatccattccgaaattagtcggtgacaccagctttctctgtctgtgaaaacctgaagggaattcaaaatcagcgcctctgatgctgaccgaaaccgtatggccgatgtattgtttgaaacgggcgcggcgggccacttcttcgcttaactccagcagcacgactttgatatcctcaaagcggctgtagtctctcgggagggtcatgttatggccgatcgctttttgccggctgtgcgtgttgacggtgaccggagagggatcgatgccgcgggctgtccgctgaagcaattcgccgttaatgccccagcgttttttcagcaattcggcggggtgtccggcaagcccgccgattgtgctgatgcccatccgtcttaaatgatgctccattcgttttccgatgccgaataattttccgaccggcagcggccacagatcctgcctgatatttgacatatccaatctgtggatgccggatgcgttttttttggcaaaatggtcgcaagccattttcgcgagcgccttattcggcccgatgccgacacgggcataaatgccgaattcacgcataatcgcttgctgaatgcttttggcaattgtaaaaggatcaccgaacagccgcctgcttccggtcacgtcgagaaactgctcatcgatggagtagggttctacaagatcggtataccgttcaaacagttcggtaatcatgacggatacatcaatataccgctgcatccgcggacggacaataacggcatcgggacatttggcctgcgcttcccacagccgttcggcattttttacgccgtatcgtttggcgagcggacaagccgcaagcacgacgccgctgcgtctttcgggatctcccgagacaatcacgggccggcttttgagatgaggcgcttccgctttttccacagacgcataaaacgattgcatatctacaagaagaatatcagccataaaaaaacctccgggaacgtttgttctgtttttcattgtacccgaacaatgaccacgtttatactggtaaatcattccccggctggaagacgtgctgatttgtttgcttgaaaagaaatcatttacaattgcaaacaacccacatataattttttatattccaatgagaagagctgacattcattttgccggacgaaaaggagagtcaatcgataatggatattcgaacaattacctctgaagactatgaaatggttacgtctgttttgaatgaatggtggggcggcaggcagatgaaagacaaactgccgcgcttgttttttgaacattttcaggacacaagctttatcacgtacgggccggagggaatgaccggttttttaatcggttttcagtcgcaatcagaccctgagacagcctacattcatttttccggtgtgcatccggatttcagaaaaatgcaaattggaaaacagctctacgaccgatttatggagacggtgaagaaaaggggctgcacaaaagtcaattgcgtgacggcgcctgtcaataaagtatcaatcgcttatcatacaaaattaggctttgaagctgaaaaaggaaccaaaaccgtaaacggaatccctgtttttgcgaattatgacggtccgggagaagaccggattctgtttgtgaaatatatgtagagggggatgaatatgggttttttagctgacacgcccaaaccgccctattatgcggtcattttttcatcaataaagggaaaatatgatgaggaatatgaacatacggcagagcgcatgatgaatttggcaggcggacagccgggctttttaggcgcggaaagcgttcgggaggaaaacggctgcggcatcacggtttcctactgggacagcctggaagcgattaaaaggtggaaagaccatacggaccaccaggcggcaaaacaaaaaggaaaaaccgcctggtatgaagcgtacgcggtccgcattacgaagacggagtcacagcggatgtttgcgtcaaaaggggcggaagattgattacatttttacagcatacacaagaacagaccgcgcgggaaattgcggcggttcagcgctgctcttatcaaaaagaagcagagctgatcggctttttcggcatccccgccttgcatgaaacacccgatgatatacagcggtcacgggagacgtttgccggtttcaaggaaaaagatcagcttgcaggcgtcatttcgtatgaaaaaaagggatatgaccttgtcatatgcaggctgacggtgcacccgtccggctttcgaaaaggaatcggacgggcgcttattcaatttgtgatagacgagaaccgggacgcccaaaaaatagaggcggctaccgccagccaaaacgttccggcagtctctctctatttaaaaacaggtttcacagaagccggacagatagagacgccggaagggctggccctctcgttttttcatctttatccgaagaggaaagcggaagttgttccgtacaagccggaatggaaagaaatgtttgaaagagagaaggcggacttgatccgaatcttcggcccagcacttcattctgtcagacacatcggcagcacctctatcccggggatggccgccaaacccgtcattgatatactggcggaggttaaagatatttcggacgctgaccgattcagtccgcagctggaagcactcggctatgaggcgaaaggggaaaacgggctagagggccggcgtttctttcaaaaaggcggcagcaagcgcacacaccacgttcacatatacgaaacaggccatccggacgtgaagcgtcatctgctgttccgggatttcctcaccgcaaagcctgaaaaagcggctcaatacatggaactgaaacggcacctcgctaagacgtacccatacgatatggaaaaatatagtgaagggaaaaatgactggatcaaggcggctgaacaagaggcaaaggtctgggagagcgggctgctgtaaagaaagcagaaacaatgcatacagcggctcggtatgctacaatggcgaaaatgaaaaacggaggatcatctatgcaaatacatgtgacggatgcggcgaaacacacacttcagcaggcaatggacgccaacccggggaaaaaagcgcagctccgctatgacgcagaaggctgcgggtgcgcggtgagcggcgtgccgaccatctggctggcggacgaattaacgggacaatgcgaagccattgaaaccaacggacttccgctttacatccagacctcacaaaaagtgttttttgacgaggaaatgacaatcgattacaatgaaaaggcaaaaacgctcgtcttaaaaagcccggcagagatgctgagcccgagaatgagcatattagtaaagcagggagaaacggaaagtgaatcaaaagctgaaagccattaaacagacggcacagcataaaacgtgggtatcctttctgaacaacaaccacccgtacagtctgctgcactggtccatcggaggcgctgaatccgttcagaaggatgtctggctgcttcaggatgagatgaccttcaaagcgcaggagtttacgacaatcgacctcgccattgactggatcggagaaaatatggacgggattaccgacgttttatgacgtgaaagcgaaagaaccagcatacgttctttcgcttttttacgtttgcgtcatggtatctaaaaaggtttgaacggctttacggtagctctccggatttttggtgtacgacatggcatgcccgcccgattcggccagatagagcatcttagggccgcgttttttgcggtgcagcaattcggaacaagcgggaggtatataatcatcttccttactgtgaataaacagcacgggctgccggattcggctgataaccgatagaggcgatacatcacggatacggtatccttctctcatccgcaaaaagaaatcagccaaaggcagaagcggccacggaggcagccggaactcccgcttcaccctgtaggcgagctgatcgcgaaagcttgcgaacggacagtccgcaatataaaaatcagcgccgttttcatcctgatgcccgcccgcgtataataaggccgtcaccgctcccatcgattccccgtggatgccgatttgaccgccgtctccggttttgtgtctcacccaattcacggcttcttccaaatcatctttttcaaaatagccgtagctcgtcgttctgccgccgctttttccgtgcccgcggtggtcatatacgagcacattccatcctaaatctaaaaataaatccatgtatttcaatgaattgaacgaatttacggtaacgccgtgacaaataatcatggtgtttgccgtatgatgcggggcgacgtaaaagcctttgatctcatacccgtggcgtgacaggatgacagcctcttctttttccatggcctgaaaggaatcaaatctatcatgcccgtccgccgtttcttttttcatgatatcttcatccgtctttttcttcataaacataatcagattcgtaaaagcgaatccggcagccaaaaagactgcgcaagccgaaccgaacaccgccagccgttttttcacacaggcaccctcctttcatatgaaaaatccttcctccggcttttcaggaccgtgaacgttgccggcctccggcgctccgtggtacacttgcttcaccatattcagatacggggggcgtaatgatgaaaaagcagctgcctaaagaaaaacacagcttaaaagacgatctggaggaagatctgaaggccaggcttttgcaaatgaaaagtgagctgaaggaagaagacgagaaaaaacaggcgcagcaaaaggcggaacaaatcagaaaacgaaaagaaaaagaaaaacataaaagctttgaagagctgctgaatgaaagcagtctcgattggcacaaatataaataaaccggcatctgaaaaggtgccggttttatgatttaagaacgatgggcttcgtatacgtcccgttttgtatggtattgcagggctttgatttcctggctgcttaaacgccgggcctctgcagccgaacagttttctctcagctgctcaagtgagctggctccggtgatgacagaagcgacggcctgctgtgacagtaagtattgaagagaaagctccgtcatgctcaagtcaggtgcggcagcgctgatcgcttttttggtttctcccagttctgcaaaagaatatgttaaatagccgttctcttttacgcttgcggccgcttgatcaagcggtttttccgtaagaagccctttagcgacaggccctcttgcgactacgctgattccgttctcctctaaaaggggaagccactcctcgggacgccggtccagcaggctgtattgcatcataatgctggtgatatttgattttttcacatattctttaataacattcggacgaatcgaggaaatgccgtaataccggatgacaccttcctgttttaagtcctcaaatgcttcgatcgtttcgtcaatatgatcttccatcgtgccgccatgcagctgataaaggtcgatatagtccgttttcagccggcgcaggctgtttttgaccgcttcttttatgtatcctttggaagcgtcccaatgccagccgtctttatcatcattccagcggtttccggctttcgtggctaaaatgatgtcgtgtctgcggtttttgacggcctccccgacaatttcctcatttctgccgaaatcataaagatcagcggtatctaaataattgattccaagctcgatcgcttcatccaaaatagacagcgctttaactttatccgtgcccagcgacatacagccgagcccgatttcgcttatttctaaatcagaatgtcccagtgtgcgttttctcatcgtttcgctcctttttatagtcttttattgaccgtaatataaaggcgcgaagttttcaactgttaaggcccggtgatccaatctccgacatagcggaatgtccgtccgtattctttcagtttagcccgcacttcccacgcctttccgaccaatacgatacttttatccttccggtacaccttcaatcgaaaagcacctccctctcatgcatgtatgataaaatatatgaggcataatagagagacagaacgggagatgacatgatgagacatttagaagaaaaaacacttgcgaaaaaaaagctgtatgacgggaaagtcatagatctttacttagaggatgtagagctcccgaacggaaaaacaagcaagcgggaaatcgtcaaacatccgggagcggtggccgtacttgcggtgaccgaggaaggaaaaatcattttggtgaaccagttcagaaagccgctggaacggacaatcgttgaaattccggccgggaagcttgaaaagggggaagagccggaacatacggcgttaagagagctcgaggaagaaacgggatatacggcggaaaccttgacgaaaatcaccgctttttatacatcacccgggtttgctgatgaaatcgtgcatctctttcttgcggaagggctttcgccgctggaagaaaaacgagagctggatgaggatgaatttgtcgaagtcatgcaggtcacgcttgaagaggccgtgaagctgattgaatcccgcagggtgtatgacgcaaaaacggcgtacgcgattcagtatctccagctgaaagaagcgctgaaggaaaaatgatgaaaaccatctatgcggatctgcatattcatatcggccgcacctatacgggaaaaccggtcaaaatcaccggagccaaaacgttgacgctgcaccggattttagaagaagccagtgaggggaagggaattgaactattgggcatcatcgactgccattccccggaagtcatagaagaaatcgagcgcggaattgatgaaggcagataccgtgagctgaaagaaggcggcatccggtatcggaatacgacgcttctgttgggcagtgagcttgaaatctatgatcacacatgccgcgggccgattcacgttctcgtctttatgccgtctcttgccgaaatgaagatgttttctgagtggcttgcaaaaaggcttaaaaatatccatctcagttcccagcgcatttatgaaaccggtttgaatcttcaaaggaaaacaaaggaattgggcgggctgtttattcccgcccatatgttcaccccgcataaaagcctgtacggaaaaggagtcatatcttctttgacagaagttttcgacccggcgctcattgacgcggcggaactcggattaagctgtgacaccgacatggcttcgcgggtaacagaacttgatccgtatacatttttaacaaattctgatgcgcattccttaggaaaaatcggcagagaatataatgaaatgcttcttaaagaagcgaatttcacggaattttcgctggctttaaaagggaaggacggaagaaaaatcacggcgaattacgggctgaacccgaagctcgggaagtattaccggacggcttgcgaccgctgcggcagcccggttgaaaaaggagcttccgcatgtccggagtgcggggggaaaacaatgacaaaaggggtcagtgaacggctggaggaactgagcggaccgaaaaaaagccgcatgccgcggccgccgtatattcatcaaatcccgctgcagttcattcccggggtcgggccgaaaacgttagaaaaactgaagcgggccttcgggacggagatggcgattcttcatcaggcgcaagaagaggaattggcgcgtgtcgtccagcctaaaatagcggctgtcattcataaagcgcgtaccgggcagctcgtccttgaggccgggggcggagggacgtacggcagaatcaagccgtaaaagccggtttttagcggagctcctcctgcaccttctttttcgtgcggacaaacgcaatcaattcgatgatttcatcctgattcagcggctgtccgtcaacggtcagtgtgccgcggccttgtgcggcgtttgttaattcgatggtctgggcaaacggctccgcctttttttcagtgcgcccgagtaaatcgtcgcacgtcgtgtcaaacagatcggcaagcgtgcctagcgcctcgaatgacggacgccggtatcctgattcatacccggcgtacgtgcttttggcgatgccgagacggtcagccgtatattgaagagaccaatttttcttttttctcagttcagttaaacgatctaaattcatattcaaaaccgctccttttcacttgagcaaattatatcatatcgatatgcaaaagtgtacgcgaattgaataataatcacttgattaatttcattcgtctgtctataatttgattaaaagtatgcgaaaagcgaatgcttaacacatcttgagaaatggatgaagaggtgcagggtatgaaaaaattattgctgttaacaaccggaggaacaatcgcctcagtcgaaggagaaaacgggcttgcacccggggtgaaagcagacgaattgttaacctacgtatcaaaacttgataacgattacacgatggaaacccattcgttaatgaacatcgacagcacaaatatgcagcctgaatattgggccgaaatcgcaaatgctgtcaaagaaaaatatgacgcatatgacgggttcgtcattacgcacgggacagacacaatggcttatacatcagcggcactgtcttatatgcttcagcatgctgataaaccgatcgtcattacgggttcgcaaatcccgattacatttcaaaaaaccgatgccaaaaaaaatatcacggacgcgatccgcttcgcatgtgaaggggtgggcggcgtatacgtcgtatttgacggcagagtcattcaaggcacacgcgccattaaattaagaacgaaaagctatgatgcatttgagagcattaactatccgtatatcgcgtttattaccgaaaacggaattgaatacaacaaacaagtgcacatcccaaaagacgatgcttttacggtcaatacttcactttgcacggacgtgtgcctgctcaagctccacccggggctgaaaccggaaatgtttgacgcattaaagggcatgtacaaaggaatcgtcattgaaagctacggcagcggcggtgtgccgtttgaaggaagagacattctcgccaaagtcaatgaaatgattgaaagcggcattgtcgtcgtcattacgacacaatgtcttgaagaaggagaggacatgagcgtctatgaagtcggccgaagagtcaatcaagatctcattatccgctccagaaatatgaacacggaagccatcgtgccgaaattaatgtgggcgctcggccagtctcacaacttggctgaagtcaaaaacattatggagacaccgatcgcagacgacgttgtactgtaaaaacatgactaccacaaagagaaagtagggttttagcatgacaaacgcgcaaaaagaatatcgtcaggaaaaagatttcctcggagaaaaacaaattgaagctgatgtgtattacggaatacaaacgctgcgcgcgaaagaaaactttccgattaccggctaccgcatccacgaagaaatgattaatgcgctcgccatcgtcaaaaaagcggcggcgcttgccaacatggatgtaaaacggctgtatgaaggaatcggaaatgcgattgtacaggccgcagatgaaattcttgagggaaaatggcatgaccaatttatcgtcgatccgatccaagggggagccggaacgtccatgaacatgaatgccaacgaagtaatcggcaacagggctcttgaaatcatggggcataaaaaaggtgaatacattcacctcagcccgaacacacacgtcaacatgtcacaatcgacgaacgacgtgttcccgacggcaatccatatttcaacattgaaacttttggataagctccttgatacgatggcgcatatgctcagtgtctttaaagataaagcgaaacaatttgattctgtcattaaaatggggcgcacacaccttcaggacgctgtgccgatccgtctcggacaggaatttgaagcatacagccgcgtgcttgagcgtgacataaagcgaattaaacaatcccgccagcatctgtatgaagtaaacatgggggcaacggccgtaggtacggggcttaacgccgatccgcgctacatagaacaggttgtgaaacacctggctgacatcagcggactgccgcttgtcggcgccggccatttggttgacgccacacaaaacactgatgcgtatacggaagtttcagccgcgttgaaagtatgcatgatgaacatgtctaaaatcgccaacgatctgcgcttaatggcttcaggtccgcgcgcgggacttgcggaaatttcactgcccgcccgtcagccgggatcatccattatgcctgggaaagtcaaccctgtaatggcagagctgatcaaccaaatcgccttccaggtcatcgggaatgacaatacgatctgcctcgcttcagaagcgggccagctggagcttaacgtaatggagccggtactcgtatttaacctgcttcaatccatcagcatcatgaataacgggttccgttcatttaccgatcattgtctggcgggaattgaagccaacgaaaaacgtctgaagcaatacgtggaaaaaagcgtcggcgtcattacagcggtcaatccgcatctcgggtatgaagcggctgcgcgaattgcccgtgaagcaatcatgacggggcaatctgtaagagatctttgccttcaaaatgatgtactgacagaagaagaattggatatcattttgaatccgtatgaaatgacaaaaccggggattgccggaaaagatctattagaaaaataaattttaaagcaacaacagccgccttttcacgttttttagtgaataggcggttgccatacaaagggatgaggcagtatagtataatttgttatatcatttgatgaaagcgttttagcttttttcttctagggggattttcttgtgaaagaggccagattgccaaatttattggaaattattatcttattattcgggtttttagcgcttgtcttatcatttacagtatttttagacctgccgattcagcttgctctatttatatcctggtttatcgctattattctcggagtcagactgggatattcatataaagacttgcaggcttcgattgtcaccgggatatcaaacggtcttgaagcagtgttgattcttgtttcggtcggtgcgctcgtcgggacatggattgccggcggcgttgtgccgacgttaatttattatggtttagagtttattaatcctcatgttttccttctggctacactggttatttgttccgttatgtccgttgcgaccggaacgtcgtggggaaccgtgggaaccgcgggaatcgccatgattgccatcggagagggaatgggtataccgcttccgatcgtggcgggagccgttttgtccggcgcttacttcggagacaagctttcaccgctgtctgacagtacggtgcttgcctccacgctttctaaggtggatgtgctgtcacacgtcagagcgatgatgtatctgtcaattccgtcctatattattacggccattctgtttaccgtaacgggatttatatacggcggaaaaaatattgatcttggcaaagtggaatttttaaaatcttcattgcagaaaacgtttgacattcatatatggatgctcattccggctgttgtcgtcgttgtccttctgattttgaaaaagccgtctatgcccgttatcgtcatcggtgctttgcttggcgcaatctgggcttccgtctttcagggaatgaattttgccagtgccatcgcgactgcttataatggtttttccattaaaacggacgtcgaatttttaaacggcctgttaaaccgcggaggcattaccggtatgctggatacgttagtcgttatccttttcggtcttggttttggaggaattcttgagaagctcggcgtattaaaagtgattgtctcaacttttgagaaaaagctgaccacaccgggaaatgtgacgctttcgacattgatcgtcgcccttttaggaaacattttcggctgtgcgatgtacgtgtcattgatcctgacgccgaaaatcatggagaacagttatgataaactgaaacttgacagaagagttttatcccggaacgcagaggtgggcggcacgcttacttcagggatggtgccgtggtctgataacggcatctatatggccggcattctcggcgtatccacattttcttatctgccgttcatgtggctcagttttgtatctatcggactggcaatattgtacgggtacacggggaaattcatttggtacacgaaagaaaaatccttgcaatctcaaaaattgggttaggaggttcatttcatgattacaaagcatatgattcggacgttaatgattgaaacgccgactgttcccggaaatctcggaaaagtggcaaccgccatcggagtgatgggcggagatatcggggaagttgaaaccgttaaagtcggcccgaactacacaatgcgcaacatcactgtgcaggccgaaaatgaagagcagctgcaggaaatcattcaagccattgaagctctcggtgaaggcatccggcttcatacagtctcagatgaagtgctctctgctcatgaaggcggcaaaattcagatgaaaagcaaaatgccgatccggacattggctgagcttggccgtgtttatacgccgggtgtcgccgatgtgtgccgactgattgaaaacgagcctgataaagcgtccatctatacgacaatcagcaattctgtcgccattgtcaccgacggaacggcgattctcggcctcggcaatatcggctctgtcgccggaatgcccgtaatggaagggaaagccgcgctttttgaccagctggcgggtatcagcggaattccgattttgctcgatacctctgatccggaagaaatcattcgcacggtaaaacatatttccccggggttcagcggaattctgcttgaagatatcggttcgccccactgctttgacattgaagaccgcctgaaagaagaactggacattccggttatgcacgatgaccagcacggcacggcggtcgtcacgctcgccgcagccatttccgcttgtaaaagcgccggtcttgatttaaaagaagcgaaggtcggtcagatcggtctcggcgcggcaggcgtcgccatctgccgcatgtttatggcatacggagtcaaagcggtctgcggaacggacaagtcagaagacgcaatgaaccgcctcgctcagtacggaggtcagccgcttggaagcatcaaagaattaatggacacgtgtgacattgtgatcagcaccacaggagttccgggtctcattaaaaaagaggatgtcagaaaaggacacgtcattctggctttatctaatccgaagccggagattgaaccggaagaggcattacaagccggagccgcttatgcagctgacggccgttcggtcaataatgttctcggcttcccggggattttccgcggcgcgctgaacgccaaaagcaagaaaatcgaccatgaaatgcttgtggcggccgcagaagccatcgcctcttgcacaaaacacggcgatctcgtgcctcagcctttggatgccgacgtgcatcaagccgtatcagcagccgtagaacgggccgcggcagggaaataaacaactcttacagtaccggatgtgtgccggtgctgtttttttatcatgaataggaagcggaattcttaggcaggctaacagatagcaaaagacggaataaagaggtgtcgatgtggattattttccgctgatccatacaaatatttgggatgctgtgatcggcgtgccggtcgtcttatgcgtcacacagctgatcaaagtgttctgccgggttccgggcatattcgttcccacgattgcccttgctgccggaaatatagtgtctatcgttttcggtcatcatgaacacgtgtatgcggggatttttatggggtttttttacggatacgccgcaatggggagctattcatctgccaaaacgtctctgcgcgcttaccggtcgaaacatgagccgtattcatgaacacatctggatttttttgttatgataaagaaaagggaaaaaggagcgattggcacatggcgaagagcaaaacgaaaaaaatgcgggagcatctcaaaagaaacggaatgcgtgacgcagtcctgtcaagggggacggcgccgtctttcagcacccatgaaagagtgacgaagaccaaaaaagacaggcttgaaagaataaagcataaaaaaaggaacccctatgatcaccggagtgatgacgggggttctttttttatgcccgaatctcgcgtctttctatgatttctctgtcatgttttctcttttctttcatacaatctactaaatcaagtcaatagattagcgggaggaaagcggtatgagaaaacaatcgtacaaagaactgttttttcgccatgtaaaggatcatctgtcactttatatatttgtgttcgtcttgttttttatgggagtcattttcggggcgatcatcgtcaacagcatgaccatcacgcagaaagaagatttgtattactatttaagcaagtttttcggacagctgtctgacggaaaacatgccggcgcttcagaaatgttttggcaggccgtctttcatgatgtaaaatatttggggctgatgtggatcctcggtatttccgtgatcggtcttccggttattttcattatggtgtttttaaaaggaatcgtcgtcggcttcacggtcggttttttagtgaatcaaatggggatgaacgggtttttcctgtcatttatttcggttctgccgcaaaacgtcgttctcattccggcgtatcttatcatggggacatgctctatcgctttttcactgaaactgatccggcagctgtttgtcaaacgcagccttcatgacgcgccgatccaatggttcggacgttacgccttcgtgctgattctcatcgttttcttctcggtcatcgcttcgctgctcgaggcgtacgtgtctccgctgtttatggaaaagctgtcatcacgcatattttagaatgattatcacaaaataatacttttatttatcagtttataataattatagttggaactctgcgcgtattttgttataatgagtcatggaatgcggcgtaggagggaaagacatggaaaaccgtattgatcgaattaaaaagcagctgcactcgtcaagctacaagcttacgccacagcgggaagcaacggtaagagtgctgcttgaaaacgaagaagaccatttaagcgcagaagatgtatacctcctcgtaaaagagaaatctcctgaaattggtctcgctacagtataccgtacattagaattattaacagaattaaaagtcgttgataaaattaacttcggggacggcgtatcccgctacgaccttcgcaaagaaggcgcggctcactttcatcaccatttggtgtgcatggagtgcggagccgtcgatgaaattgaagaagatctgcttgaagacgttgaagaagtgattgaacgtgattggaaatttaaaattaaagatcatagattgacttttcacggaatctgccaccgctgccgcggggatgaaacagagtaaaagcctacgaaccttttctgccaggaaagggttttttgctgtttttatgtataaaagcctttgaaattggcataaggtgtactaacagccgccaaaagaaagggtcgatcgaaagatgggcagattcttaaaaacagccgcggatacgatcaaagtgtttattctgttcacaggttttaccgcgctgttctattatgctatgatatgggtgaattcagagtatgaaaactatcatcggtacgataaaccggaaggctccgccgtcaaagtggccaaaacggaacatgaggagaaagacggctggttcggccgattgatctttttttaccaaaacggggagtagatcaagagtgaaggatcaaattaaggatttcatccattatgtgagggttgaaagagggctgtcccaaaatacgatgatgtcctatgagcgtgatctgaaaagttattctctcttcttaactgaaagccttcagatcacttcatggaatgatgtgacccgtcttcatattattcaatatttaaagcatataaaggactccgggaaatccggcaagacgtctgcgaggcatttggcgtcgatccggtcttttcatcaatttctgttaagggaaaaagccgcggataaagatccttcggtacatattgaaacacaaaaaacagagcggacgcttccgaaagtattggcgcttcacgaagttgagcggttattggacacgcctaagcttgacagcccgttcggtctcagggataaagccatgcttgaactgctgtacgcaaccggtatcagggtcagcgagatgatcgagctaaaattatccgacgtccatttgacgatgggatttgtccgctgcttcggaaaagggcggaaagagcggattgtgccgattggtgaagccgcttcccatgcgatagaagcatacattgaaaaagccagagggaaattattaaagaaaaacgtaaccgaagcgctttttctgaatcatcacggcaggcagatcagccgtcagggattctggaaaaacctgaaaaaaatcgcccttgaagcggggattaaaaaagagctgacaccgcacacgctccggcactcctttgcaacgcacctgctcgaaaacggggcggatctgcgcgccgtgcaggagatgctcggacatgccgatatttccacgacgcaaatttatacgcatgtgacgaaaacaaggctgaaggacgtgtacaaacagtatcatccgcgcgcttaggagccgctgccagaggggccgcggcttttttgccggattggcggaatacagagaaggttctaattatttgaatcggcattgtcaacaagaatgtaaacggtttatacttgagttgtctgacctctgtaagctacaatggacagatggaagaaaaggaggcttttatgatgtctgaatacaaatataaccgggtatttttgatcgtaatggattctgtcggaatcggtgaagcgccggacgccgccgattttaatgatataggcgcaaatacgctcggacacatcgcagagcacatgaacggcttacatatgccccatatggcgcagctcggtctcggactgatcggagacattaagggcgtggaaaaaacggagcaccctcttgcgtactacggaaaaatgcaggaggcgtcaaacgggaaagatacgatgacggggcactgggagattatgggcctctacattgaaaaaccgtttaaagtgttcccggaaggatttccggatgaacttcttcaggaacttgagcggcgttcaggacggaaaatcatcggaaataagccggcttcaggcacggcgattctggatgagctcggaaaagaacatatggaaacgggtgcgctgatcgtttatacatcagcagattccgtactgcagattgcggctcacgaagatgtcgttccgcttgacgaactgtacagcatctgtgaaacggcaagagaactgacgcttgatccgaagtacatggtcggccggattatcgcaagaccgttcgtcggagaaccgggcagcttcaaacgcacgccgaaccgtcatgattatgcgctcaaaccgttcggccgcacggtaatgaacggaatgaaagacagcggattagacgtcatttccatcggcaaaatttctgatatttatgacggagaaggcattacatcttcccgccggacggtatctaatatggacggcatggacaaagtgattgaaacgctcggtgaagagttcacgggcctgagctttgccaacctcgttgattttgacgcgctgtacggacaccgccgcgatccagaagggtacggaaaagcgctcgaggaattcgacgcaaggcttccggaagtgtttgagaaaatgaaagaagacgatctgcttatcatcactgcggatcacggcaatgatcctgtccatcacggcacggatcacacgcgggagtatgtgccgcttcttgtgtacagcaaaaagcacaaacacactgaacagctgccgcttgcggatacatttgccgatatcggcgcaaccattgcggataatttcaaaacggaaaagccggaatacggaaaaagctttttatcaagattacagtagggggactttttttgaaacaaaagatcgaacgtgctgctgcatttattaaagaacacgtgaaagaaacaccaaagatcggtctgattttagggtcagggctcggcgtattggccgatgaaattgaaggagctgtcaagcttacatatgaaacgatccctgattttccggtctcaacggtagaaggccatgccggccagcttgtgatgggaacgcttgaaggtgtgcaggtcatcgcgatgcagggccgctttcattactatgaaggctactcaatggatcaggtcacatttcccgtccgcgtaatgaaggcgctcggcgttgaatcccttgtcgtgacgaacgcagccggcggtatcaacactgaattccgggccggcgatctgatgattattacagaccacatcaactttacgggcaccaacccgttaatcgggccgaacgaagctgaattcggaccgagattcccggacatgtcagaagcctatgacaaagagctgtcaggcttggctgaaaaaacggccgatgagctgggcattcctgttcaaaaaggggtgtatacagctgttacggggccatcttacgaaacgccagctgaggttcggtttttaagaacgatgggttctgacgctgtcggcatgtcgaccgtgccggaagtcatcgtcgccaaccacgcggggatgcgcgtgctcggcatctcatgcatttccaacgcggcggcaggtattcttgaccagccgttatcccatgaagaagtaatggaaatgacggaaaaagtaaaaggcggctttttgaagcttgtaaaagccgtagtcgcacgatctcaaaaataagtcagcatcagtcagctgtttcttcggaagcagctgtttttttgtgccctcaacacgaaacattttccagatgaggcgtataaaaccaccggatttggaaaaaataaaaaggattatgaaatggagggctatggagatgaaacgtcttatatccactttgttgattggcattttattaacggcatcagcaccgtccgcttttgcaaagccggacggaaaacatacatcggagctcgctcatgaagccaaaagcgccgtgctgattgaacgcgatacgggaagcattctttataacaagaacagccgggagcgtctggcgccggcaagcatgacgaaaattatgaccatgcttttaatcatggaagcgcttgacaaagggaaaataaagatgagcgataaagtcaggacgagtgaacatgccgcgtccatgggcggatcacagattttccttgaactcggagaagaaatgacggtaaaagaaatgctcaaaggaattgcgatagcttccggaaatgacgcatccgtcgcaatggcggagtatattgccggttcagaagaggatttcgtcaaccggatgaacaaaaaagcaaaagaattgggattgaaagatacctccttcaaaaacccgacgggactgcctgaaaaagaccattacagctctgcttatgacatggcgaaaatggcgaaggaattattaaagtatgataaaatcactcaatttacgggaacgtatgaggattatttaagagaaaatacagacaaaaagttctggctcgtcaatacaaaccggctgatcaaattttatccgggtgtagacggcgtgaagacgggctttacaggcgaagcgaagtattgtttaaccgccaccgctaaaaaaggaaatatgagggtcattgctgttgttttcggagccagcactccgaaagaaagaaatgcccaagtgaccaaaatgcttgattacgccttcagccagttcaaaacacacccgctgtacaaacgggatcaaatcgtcggaacggtaaaagtgaaaaaaggaaaacagaaactgatcaagctgaccacatctgagccgatttctcttctggccaaaaagggagagaacatggacaaagtaaaaaaagaagtgaaaatcaacggcaatgtaacggctccggttaaaaaaggagacgtgctcggcagcctcgttctgaaaaaagacggaaaggtgctcgttgaaagcccggtcacggcaaaagacgacatggaaaaagcgggttttctcacttttctgaagcggacgatgggagattggactaaatttaaataatcgtggcgaacgggcactagttttgtcatagtgaaggaattgctttcccgaaaatcgaaacactcattatccgatcatatcaaggaggaatgagcatgagccttggaattgactttcatgtcaaagaatccgtgctttgtattcgattaacaggtgaactcgaccatcatacggcagaatcattaaaacaaaaggttactgaatcgctggaggctgacggcatccgtcacattgtgctgaaccttgaagatcttaccttcatggacagctccggcctcggtgtgattttagggcgttataaacaaattaaacagctcggcggagaaatggtcgtgtgcgcgatttcacccgcggtgagacgtctgtttgacatgtccggcctgtttaaaatcatcaggttcgaacaatcagaacaaaaagcgcttttaacgttgggggtggcatcatgaaaaacgagatgcatcttgaattttcagccctcagtcagaacgaatcgtttgcgcgcgtaacagttgcttcttttatcgcacagctcgacccgacgatggatgagctgacggaaatcaagaccgtcgtatcagaagcggtaacaaacgcgatcatccacggctatgaagaaaactgcgacggaaaggtgtacatctccgttacgctggaggatcatgtcgtctatctgaccatacgtgacgaaggtctcgggatcacggatcttgaggaagcgcgccagccgctctttacgacaaaacccgagcttgagcgctccggaatgggctttaccattatggaaaacttcatggatgatgtcacgattgattcctcgccggagatgggaacgacgatacgcttaacaaaacacctatcaaaaagcaaagcgctttgtaattaaggagatttgttatggatgtggaggttaagaaaaacagcaaaaacgcgcagctcaaggaccatgaagtcaaagaattaatcaaaaagagccaagagggcgaccagcaggcaagagacctcctcatagaaaaaaacatgcgtcttgtgtggtccgtcgttcaaaggttcttaaacagaggctatgagccggatgatctgtttcagatcggctgtatcggattgttaaaatccgttgataaattcgatttgtcctatgatgtccgtttttcaacttatgccgtgccgatgattatcggagaaatccagcgcttcatccgcgatgacggaaccgtcaaagtttcaagatctttaaaagagctcggcaataaaatacgccgggcgaaagatgaactgtcaaaaacatacggaagagtgccgaccgtccaggaaatcgcggaccatttagaaattgacgcggaggatgtggtgcttgcgcaggaagcggtgcgggcgccttcatccattcatgagaccgtatatgaaaatgacggagacccgatcaccctgcttgatcagatcgccgatcattcagaagagaagtggtttgacaaaatcgccctcaaggaagcgatcagtgatttggaagaacgggaaaaactcattgtctatctgagatattataaagatcagacacagtcggaagtagccgaacggctcgggatttcccaagtccaggtatcgaggctggagaaaaaaatattaaagcagattaaagtgcagatggatcatacggaaagctgaccttttacgggccggctttttttatttgtgtatcggtggtaatttatggtcttttgccgctgatgaatgagaacaaaagtgaaccgcatactacatatataaccacccgaaagatggtgatgcaagatggaaagacgaatatttctcagacttcgccaccgcgtgaaggctcataccggagatatcatcacaatcggcgacgccgcgcagattgcgggacagcaaaagctgaaaaaaaaactgtcggcactgccgctgtataaggtcacgaaaaaagataaaaatatcgtcgtgctggacatcataaaagtgctgaaaaccattcataccgcttttcccgctcttgatgtacagaccgtcggcggcgctgaaacgatagtggaaatccattaccaaaaaaagcagctgtcagccgttttgttcgtcggtgtctggctcctgctttttatcggttcatgtcttgccattatgaattttcatgaagatgtcagtatgagagaagttcatatcgccttatatgaaatcataacgggcgaacggaatgaatatccgtatctgcttcagattccatacagcatcggcctcggtctcggtatgatcgtcttttttaatcacatcttcaaaaaacgcctgaatgaagagccaagcccgctggaagtcgagatgtttaattatcagcttgatctcgatcattatgtcgcaatgcacgaaaatgaagagacgatgaaagatctgcatgatcgttagcattcttttcgttatgtttgtcgggcttggcggagggctgaccgtgggtgcgggctttgtggcttttttaaccgttatgggaatcgtcccccgccttatgcagctgacaaaaacaatgcgctttgtacaggcctacgaaggagctgttatttcaggagctgtgttcggcggctgggaaaccttaaatatgaatcatttttttttatctgaatggctggccgttccggtcgggcttttggccggcatgtttgtcggcatgctggccgccgcgcttacagaagtgctgaatgtgcttcccattcttgccaaacggatcggcttcggcagcaaaatcatcatattgctgatggccattgtgttcggcaaaatagccggctctttatttcattggctgtattttatccatcattcataaggaggaaccgacatgacaaacttaaaagaaaattacaaaacaaaagtgaaagactatcagccgaaaccgccatatgtttggaattgcgtcaaagcctttctgatcggcggtttgatctgtctgatcgggcaggctcttcaagacttttacatccacttttttaattttaatgaaaaaacagcgggcaacccgacggccgccactcttattttaatttccgcccttttgaccggattcggcatttatgacagactcgggcagtttgccggagcgggttcagccgtgccggtgacgggttttgctaacagtatgacaagcgccgctctcgaacacagaagtgaaggactcgtactcggagtagcgacaaacatgtttaaattggcgggaaacgtcattgtattcggcgtggtggcagcctatatcgtaggcctgatacggtttgcttgtgaaaaactgttttcgtaggaggagaaaaaatgaaattgaccggaaagcaaacctgggtatttgaaaacccgttatttgtaaatgcggcggggacggcagccggaccgaaagaaaaagacggcccgctcggttcgctgtttgataagacatacgatgaaatgcactgcaatcagaaaaactgggaaatggcggaacgtcagttaatggaagatgccatcaactccgctttgcaaaaacagaatttgaaaaagagcgatattgatttgttactcgcgggggatcttttaaatcaaaatgtgaccgccaactacgtcgccagacatctgaaaattccgttcctctgtctgttcggcgcctgttcgacttcaatggaaacgattgccgtcgcatccgcgctcattgacggcggttttgcgaaccgggcgatcgcagccacgagcagccataacgcgacggcagaacggcaattccgcaatccgacggagtacggcgggcaaaaaccggataccgccacttcaacggtcacggggggcggggcggtcatcatcagtcaaaacccttctgatatcaagattacaagcgcaacagtgggaaaagtaagcgacctcggaataacagatccgttcgatatgggatccgccatggcgcccgctgccgccgacacaatcaaacagcacctgcaggacttaaaccgcacggcggatgattatgatctgattttaacgggagacctttcaggcgtcggctcgccgatcgtgaaagatttgctcaaagaagaaggctatcccgtgggaacgaaacacgatgactgcggtcttctcatctatacgccggaccagcaggtgtttgcgggcggaagcggctgcgcctgctctgcgcttgttacgtacacacatatttttaaccaattaaaagcggggactctaaacagagtactcgttgtcgcgacaggagcgcttttaagtccgacaatgatccagcagaaggaaaccattccgaccatcgcgcacggtgtggtatttgagcgggcgggaggtgcatcataaatggaatatctgttggcttttgtttgcgggggaatcatatgcattatcggtcagctgctgcttgacatttttaaactgacacccgcccatgtgatgacaacttttgtcgtcatcggcgccttgttagatgggttcggaatttatgacaaatttatcgaattcgcaggcgcgggcgcgacggttcccatcgtcagcttcggtcacagcttattgcacggcgccatgcatcaagctcacgagcatggatttatcgggatcgccatggggatttttgaacttacttccgccggtatatcttcagcgattttattcgcatttcttgtagccgttatttttaaaccgaaaggataatgcctgatgacgaaacggaaggtcattcttgtgacagacggggacgtatacgccgccaaaacaattgaatacgccgcggaaaaagcaggcggacggtgtatttcccaatcaaagggcaatccgtcaacgagaagcggccccgaacttgttcagctgattaaagccgcgccgaatgacccggtgtttgtcatgtttgacgattcaggcctgcaaggggaagggccgggcgaaacggcgctgaaatatgtcgcctcacatcaggacattgaagtgctgggggtgattgcggtcgcttctaagacccatcaggcagaatggacgaaagtcgatgtctccattgaccgtgatggagaagtgacggagtttggcgtcgataaaaccggaatgagagaaatggacgagcacagaatgaacggagatacggtgtattgtctggataaattggacgttcccctcattgtgggcatcggcgacataggtaagatgggaagaaaagatgacatatcaaaaggctcgccgatcacgatgaaggcggtcgaattcattttagaaaggagcgaaagccatgccggaaaaaccggaaaacatgatcaaggtgtaccgggatcctagaaaaaatgaacaattttttaaagaccgcgtcggtatgggaacgagctatgatgtcggcgtccgcaaagttcgagtattagaccgggaagtccagatttactttgtcaacggattaaccgatactttgtttatcattcatttaatggaacagctcgtcgacgtcaataattatgacgagaatgcggatgaagcgattgacgttgttgaaaacagacttgtcaatcagcaggttcaaaaagtcaaaacgctcgacgaagcaacggatcaagttctttccggacttgtggcggttatcgttgaagacgcgggcttcgcctttatcgttgacgtcagaagttatcccggacgcacgcctgaagaaccggatacggaaaaggtcgtccgcggggcaagagacggttttatcgaaaatatcgtcattaatacagcattgatcagaagacgaatcagggacgaaaggctccgcgtcaaaattacgaaagtcggcgagcgctctaagaccgatcttgcgattgtgtatatagaggacatcgctgacccggaccttgtcagcatcgtcgaaaacgaagtgaatgcgattgacattgacggactgacgatggctgataaaacggtggaggaattcatcgtcaaacaaggctacaatccgtttccgatggtcagatacacggagcggccggatgtggccgccaatcacattttggaagggcacgtcatcatcgtcgtcgatacgtcaccgagcgtgatcataacgccgacaacgatatttcaccatgttcagcatgcggaagaatacaggcaggcgccttcagtgggcacatttttaagatggatcaggtttttcggtattatcgcttcaaccgttctgcttccgatttggttcctctttgttctcgaaccgtctcttctgcccgaaagattggattttatcggtttaaataaaaatacgcacatcccgatcattctgcaaatctttttggccgatttggggattgagtttctcaggatggccgcgatccatacgccgaccgctttatccaccgccatgggtctgattgcggcggtgctgatcggtcaaatcgccatagcggtggggctgttttcagcagaagtgattctgtacgtatcgatcgccgccatcggatcatttaccacgccgagctatgagctcagcctcgccaataaaatgatacgcctcatcttaatggttctcgtagccattttccaagtgaaaggctttgtgataggttttacattgctgctgatcataatggcgaatatccgctcgtttcacacgccgtatttatggccgtttttaccgtttaacggcaaggcgctgtggcaggtgctcgtccggacgacagtgccgggagcgaaagtcagaccgagcattgttcacccgaaagaccgtcaaagacagccaagcggttcataatcgcattgaaaccgacagaagattatgatattgtatgtcttaacttatacgggacttgtataaggacagctcaaaagaagctgtccttttcacccatatgcggatcagaaagagggaatgagcattgttcttacatggcacaagcagacaaaacaaactaggtcatttggaaatcggaggtgtggacgcgctgtatttagcggagcattacggcacgcctctttatgtttacgatgtggctttaatacgtgagcgcgctaaaagctttaaacaggcattcattgacgcggatttaaaggcgcaggtcgcgtacgcgagcaaggcgttttcttctgttgcgatgatacagctcgctgagcaggaggggctctcactggacgttgtatccggcggagagctgtttacggcggttgcggctggttttccggctgacaggattcattttcacggcaataacaaaagcgaagaagagttgaaaatggcgctcgatcatcaaatcggctgcattgtcgttgataatttttatgaaatatccttactcgcggaactgtgccgcaaatcagggcgcacaatggatgtgcttctgcggatcactccgggggtagaggcgcatacgcatgattatattacgacgggacaggaagattccaaattcggttttgatctgcataacgggcaaatagaaaaggcgattgaacaagtattacagtcagaccatatccgccttctcggcgttcactgccacatcggatcgcaaatttttgatacggcgggctttgtgctggccgcagaaaaaatcttcacaaaactgaatgaatggagagaatcattcggctttgtttctgaagtgctgaatttagggggcggctttggcatccgctacacggaggaggatgaaccccttcatcctgccgtttatgtggaaaaaattatcgaagcggtaaaagaaaacgcagcgctgcacgcttttgacattccggagatctggattgaaccgggacgctcgctcgtcggagacgccggaacgacgctttataccatcggttcgcaaaaagaagtgcccggcacccgtaaatatgcagcggttgacgggggcatgagcgataatatccgtcctgccctgtatcaggcgaaatatgaagccgtatcggcaaacagaatcggagaacaccacgataaaacggtatccatcgcgggtaagtgctgtgaaagcggtgatatgctcatttgggatatagatcttccggaagtgaaagaaggcgatcttctcgccgttttctgcacgggagcatacggatacagcatggctaacaactacaaccgcattccgcgtcccgccgtcgtttttgtggaagacggcgaagcgtatcttgtcattagaagggaaacttatgaagacattgtaaaactggatctgccgtttaagacgggggtcaaacaataaataaaaaagagaccggaacaatggcgtccggtctctttttgcattcagctgttagaacttgatccgctgtctcctgtaaatacagacacgatcgcattccaaatcgaagcgaagaaatcaatgactttttgaacaaagcttttgccttcatcggattgaatgaacttcgtgattttgtcttttgccttgtcaagctggctgccgacttggccccaatcaatcttggcatttttcattttattaaacaatgaaacgagctggtctttttgagcgtcagtcagtgtaatgttgaggtttgaagccgcatcatcgacctttttctcgattccttcttttgtatcgggcacaccgtttttcgcgaaatcatctttaatgtttgcgatgagcgcggaggcgtttttatccccgattttatccccgagatttgaagtggtgacaagctcttggttggcgacctgttttacatcttctgaaatcgctttgtctgatgaaacttcatatgccttgatgattcccgttaatgctgcggtgcctgatacctcaaacggcgccgtcacgtatactttcgcatctttcactcctgctgtcatcagggcgtttaagtacatttcatccgtgatggaatcgatattatgggtcttaacgtcaagcccggaccctttctttgccaccgtgatggatgatgaagagatggctcttgtgccgatttgggcattcgatatatattttcccagatattcatgttcttctttattcgtaaccgtcacttttgtcgcgttatcagggacatttaattcgtcaagcactttctgacggttttcgtttgacagatccgcccccagtgtgacgatgacatctccgactgcggcatcggccaggctgattttcggtattgtgcacaatacaacggccgccgccagcaatccaatccacatttttttcaaagcggttaacctccttcttttcaaaatgccgttttgaagcggtttgtgagggcctgcgtgaagcagttccgatacatagacggctgtgaagctgttctggtttcattttctttctgcggaagcggggagattcgttttccggctgaaggtgtggtataatagccgcgaaaagaagagcagaggcctcttccttcaaaagaatatcaaaaagaaagccggcttacaattgaaattcatattgaagaaggctttgacaaaaaacaatacggaagtaggaatgagaatgaaaactggttacatcgaaatggaaaacggcagcagaattgaatttgaactttatccgaatgaagcgcctaatacagtcgctaactttgaaaacctggcgaatacgggcttttatgacggcgttattttccaccgcgtgattccgggctttgtcagccaaggcggagatccgactgggacaggcatgggcggaagcggaaaaacgatcaaatgtgaaacagaaggcaatccgcataagcacgaagccggttctttatcaatggcgcatgccggtaaagacacgggttcaagccaattcttcatcgtacatgagccgcagccgcatttaaacggcgttcatactgtattcggaaaagtgacaagcggtttagagcatgcgaaaaacatgtctaacggagacaaaatgaaagaaatccgtgtagaaggataatgacggaaaacccgcctttttcaggcgggtttttttatgtatatgaaaattctcatgtgtaaatcatgaaaaaatacatatatgaacatcagcgatcattctggtatagtgaaaaagaccgattacaacaatgaaaagaggtagaaacgttggttcaattggcaaccgttttatttgtcattctcattctcgcacttatgatttggttcagggtgaaaaagggaaacaggccgattaaaggcggcggcttcggcatcattctcccgctattgattatcgccgtcatttttacattcagcatcagccagctcatgaatatcccgggaaagccgtttcattttcccgctctttgggagctcgccatcgccggactgttaggcgcggtattcggcgtcatcatgctgtcgcaaaccgcctatgaaatccgggaagacggctttgtctactccaagcggaataaaaactttaaatatgtcattatcgcgattattgcgatccgtatcgtgctcagccaatatttcaaaaacattgacgcggcggaattcgccgttttaacgatggaacttgcttttgtgtatttgtgcatttggcggatcggaagcttcgtgaaataccgtaaaatcagcagatccggcttataaaatgaaaaaaatggatgaggtgcggggcttatttgccctctgtgcagggattcatggtaaaataaaaacgaccatggctaatgggaggaaatcacttgaaatcagaaaaagaaaaaacttctaaaaaaagcgccgtacttgattgggcgaaagccattatcatcgctgtcgttctggcactgctcatccgaaactttttatttgccccttatctcgttgatggaagatcaatggatccgacgctgcatgaccgcgagagaatctttgtcaatatgacggtcaaatacataagcgacttcaaacgcggccagatcgtcgtgctgaacggagaaaatgagcactatgtcaaacggattatcggacttcctggcgacacggtgcaaatgaaaaacgatcagctgtacatcaacggcaaaaaagtgtccgaaccgtatttagcggcaaacaagcacaaggcgaagcaagaaggctatgaccggctgacagaagacttcggcccggtgaaggtgccggacgacaaatatttcgtcatgggtgataaccgcagagaatctatggacagccgcaacggcctcggtctctttacgaaaaaacaaatagcgggcacatcaaaattcgtcttcttcccgtttaacgaaattcgcaagacgaaataaaccgtacaggcagttttcttcatgaggaaaactgcttttttatataaatttatctttccaccctcaaaaacagaacataaattcgtatatctatttaatagatagaaagttttacagatacatgaaacatcttccctttatgaaacgttatatgaataactcacgcagggaagaacgtttttctattcatgaaaaaaaggaatatgacatagtaatgaatagattgatacgggctggaggtagaaaaatgggaagaattaaaacaaaagcagccattttacttgtactgctgctgttattagcgggcggttatatggtcataaacgatattgaactgaaagacgtgccgactgcaatcggacaaaccctgtcccaggaaaaagaagaatatacagtcaaaacatataaaattacgaaaatcgaaggaactgagtaccacggtacggcagaaaacggcacaaaaattatttttaacggcgacaagctgaagcaggatctctccgatgtgaaaaagggagataagattaaagcgtatttcagcaaatcaaaccggattgacggcttattgaaggtcgtcaaagtgaacgaataaataaaggcgccttttatgggaaaagggcgctttttatttttctgaataattaggtgcaaattcattgcgcctgccgcaaaggatgttataatagcggataaggacaaaaaaatattgattgtatccttcggggctgggtgaaaatcccgaccggcggtaataaggcgttttgcgctttacagcccgtgacccgtatgcatctgtatacggtggattcagtgaaaagctgaagccgacagtgaaagtctggatgggagaaggatgagagaagctatgcaaaaaataaacttactgtatagtcttatttcctatggattaaaactggcaaagccccgaactgtgtaaacattcggggcttttttgacgccaaattgcgtggaagaagggagggataacgatggaagaatattatatgaatacggcaatagaacttgccagacgcggtgaaggacagacacagtccaatcctcttgtcggcgctgtcgtcgtcaaaaacggacagatcgtcggaatgggcgcccatttgcaatacggagaagcgcatgctgaggttcacgcgattcatatggccggcagacacgcaaaaggcgccgatttgtatgtgacgctggagccttgcagccattacggaaaaacaccgccatgcgccgaactgatcataaagtcggggataaaaagggtgtttatcgctgtgaaagatccgaatccgcttgtagccggaaaaggcatcggaatgctggaagcagcgggcatcgaagtgaaaaccggacttctcaggcagcaggcagaagagctgaataaaatgtttcttcacttcatgcggaccggacttccgtatgtcaccttgaaagcggccgcgagccttgacgggaaaacagcgactgaaaccggtgacagcaaatggattacatcagaggcggcaaggcttgatgcccagcaatacaggaaatcgcatcaaagcattcttgtcggagcaggcacagtcaaagccgataatccgagcctgacctgcaggcttcctgatgcggtgaagcagccggtcagagtgattctcgatacaaagctgaccattcctgaaacggcaaatgtgctcactgacggcgctgcgccgacatggatatttacggccaaaggtgcagacgtgcaaaagacagaccggctgaccgcactcggaataaaagttattccgctggaaacagaccgcattcacgtccctgaggtgctcggtattctcgctgaaaacggcataatgtccgtttatgtggaaggcggagcatccgtacacggaagttttgtcaaggaaggctgtttccaagagcttcatttctatttcgcccctaaattaatcggaggaacgcttgctcccagcttgatctccggtgaaggttttcaatcaatgaaagatgtcccccatttacaattcacacaaatcacccaaatcgggccggatataaaactgacggccatacctaaagatggaaaggatggtgacgatgtttacaggaatcgttgaagaaacaggcacgatccaaacaatcaaaaagacaggcctttccatggcattaaccatcgccgcttcaaaagtgacaagtgatgtgaaacttggcgacagcattgcggtaaacggcatctgcctgaccgtaaccggattttctgacaatcaatttacggttgatgtcatgccggaaacagtgaaagccacttcgctgaacggcttgtcaaaaggcagtaaagtaaacctggaaagagcgatgtccgccaacggacggttcggcggccactttgtatcagggcacgtggacggaacggcggaaattacgcggatcgagaaaaaaagcaacgcggtctattacgatttaaaactttcgccggaattgacaaaaacgctcgtattgaaaggttcaattacggtagacggcgtgagcctgacgattttcggtttatcagacgaaagcgtgacggtatccatcattccgcataccatctcagaaacgatttttcagacgaaaacagtcgggtcgatcgtaaatattgagtgtgacatgatcggcaaatacttataccgctttttgcacaaaacagaacaaacgaaaagcaatcaaactatcacggaagcctttttaagcgagaacggcttttagaaaggaagatcgatatgtttcatccgatagaagaggcgttagaggcgctgaaaaaaggtgaagtcatcattgttgtcgatgatgaagacagagaaaacgaaggagatttcgtagcgctggctgagcatgccacgcctgaagtggttaattttatggcgacccatgggagaggcctgatctgcacgccgctgtctgaagacatcgccggccggctggatcttcacccgatggtcgatcataatacggactcacatgagaccgcgtttacggtcagtattgaccacaggctgacaaaaacgggcatcagcgcgcaggaacgatcctttaccattcaggcgctgttgaacgaagaatctgtgtctgacgattttcagcgtccgggccacattttccccttaattgcaaaaaaaggaggcgtcctgaagcgggccggccatacggaagcagccgttgaccttgcaaaagcctgcggatctcagggagcgggcgtcatttgtgaaattatgaatgaagacggcacaatggccagagtgccggagttagccgaaatcgccgaacgccaccagctgaaaatgattacgataaaagacttaatagagtaccgttacaacattacgacacttgtgaacagagaagttgatattacgctgccgactgacttcggcacgtttagagtttacggatatacaaacgaggttgacggaaaagaacatctcgcctttgtcatgggagatgtcccgtttaacagcgaacccgttcttgtcagagtgcactcagaatgcctgacgggcgatgtgtttgcatcccatcgctgtgattgcggacctcagcttcatgccgcgcttgcgcaaattgctgaagaaggccgcggcgttctattgtatttgcgccaggaaggcagaggaatcggtttaatcaataagctgaaggcgtaccgattgcaggaacaagggtatgacacggttgaagcgaacaaagcgctcggctttctgcctgatctgcgcaactacggcatcggcgcccagattctccgcgacttaggggttcagcatatgaaacttttaaccaataacccccggaagatcgccggcctcgaaggatacggtctcagcatttcagaacgggtgccgcttcaaatggacgcgagtgagcataacaagcaatatttacagaccaaaatgaaaaaacttggacatctgcttcatttctaaaaacaaatctcacaaaaaaggatggataacatatgaatatcatacaaggaaacctagtaggaacaggacttaaaatcggaatcgtcgtcggcagatttaatgaatttataacgagcaagctgttaagcggagcggaagacacgctgcttcgccacggtgtagaatcaaacgacattgacgtcgcttgggtgccgggagcgtttgaaatcccgtttgcggcaaagaaaatggcggaaacgaaaaaatacgatgccgtcattacgctcggcacggttatcagaggagcgacaacgcattatgactatgtctgcaatgaagcggcaaaaggcattgcccaggcgggaacggcgacgggcgtcccggttatcttcggcatcgtgacgactgaaaccattgagcaggccatcgaacgagccggaacaaaagccggaaataagggagcggattgcgcagtatctgccattgaaatggcaaatttaaaccgttcatttgaataatttgttgaaaagcgtttaaaacagcggcgaaaatgatataatgtgaggaaacggatcgcctttatgtatccgtttgataggacatgaatggacattttggatatagaggggtttttatgttaattcgttataaaaaatcgtttgaaaagattgcgatgggtcttctgtcatttatgccgaatgaaaaagatctcaagcagcttcagcagacaataaaggactatgaaacggatactggccgccagctctttctttggaaagaggatgaagatatcgtcggagcgatcggagtcgaaaaaaaggactcagaagttgaaatccggcatatcagcgtgaatccttctcaccgccatcaaggaatcggaaagcaaatgatggacgccttaaaacgtctgttcaaaacggaggcactcgttccgaatgaattaacgcaaagcttttttgaacgctgtcaacatcaaaaagatcaggatatctcatataataactgacaaatgctcccggaatcttcacggtttcgggagctgttttgatatagaaaaagcagggctgaccgtcagcctctgcttttttttcttctctcaatttcccgttcgcgttccttaatgacatccgtcctgtcccgcaggcggtgtttatgaataagaaaggtatctgatacgccgtcttgcccccatgtatagccctttcggcggcattcggcaagacatgcttctttcagggcttcatctgtaatcggcagcataacacttctgtaaggcacgcccgcttctatatcgtctgacagcgtttctatcagctcaatcagcttcggatggctgagaccgagggaacagaccgcctgcttttcagaccggagaatacgtaagctgttggcaatcagccgtttcgccccggcttcatttcccctgcgctggtgatacagagcgacggcaagctgaatcaggccgacccaatgaacgctccgcttttcagccgggctttctttccaatattcctctaacagttcatgacactcaaaataatctcttgatgcgtgaaattcggccaaaaagccgatataagctttaggatacaagccgcttcctccttttatgctaaaaccagtgtaccacagcgctatgaaaaggaaaaaagagcggcttggtgtctgaagcctgaggaactagcagatgtaagatgctcctacgacaacgagcaaaataaacagaacgacaattaatgcaaaacctccgccgaaacaagctccgctcatgtgaaatcagcctccctttgtttcaagtttacacggctatcatatgtgcatccgcctttaaaggtataggcgtatatcttctttttcagtattttctaaataacagagggtgtgtataaaagtattggacgagagcatttcggtggattatactaaagggtagccagtttttccggcaatgagagtgatattgaaaatggtgagataatggtagaatatcaagtgaaaattgatacgtttgaaggcccattggacctgctgcttcatctgattaaccgtcttgaaatcgacatatacgacatacccgtggcaaccattactgaacaatatttattatatgtacatacaatgcaagagcttgaacttgatgtcgccagtgaatatctggtcatggcggcgacgcttctcagcattaaaagcagaatgctgcttccgaaacaagaggaagagctgtttgaagacgaaatgcttgaagaagaagaccctcgggacgagctgattgaaaagctgattgagtatagaaagtataaaaccgctgcgaaggatttaaaagagcgggaagaagaaagacaaaagtcatttacaaagccgccgagtgatttaagtgagtatgcaaaagaaatcaaacagacggagcagaaactgtcggtgaccgtttatgacatgatcggcgcgtttcaaaaggtgcttcagcgtaaaaaaatcacgcggccgaaagaaacgaccattacaaggcaggaaataccgattgaagacagaatgaacgaaatcgtaaaaagcttaaaaacggcggggagaagaataaacttcacggagctttttccttctcggcaaaaggaccatctcgtcgtgacgtttttagcagtcctggaactgatgaaaaatcagcagattatcattgaacaggaagaaaacttttcagatatatacattacggggagtgaatccattcatggcgcttgatatcgtgaattggaaagcgattgtggaagccctgctatatgcggcgggtgatgaagggctgaccaaaaagcaattggtgacggtgcttgaaatagaagaagcggaactggccggaatcatggaagaagtggcggctcagtacaaggaagacgacagaggcatcgagcttaccgaatatgcggatacgtatatgcttggaacgaaaaaagaattcgtgccttatttgaaaaaactaatcgaagtgccgtcaaaagggctgtcacaggcttctttggaagtgctggcaatcgtttcgtacaagcagccgatcacacgggcggaaattgaagatatccggggcgtgaagtctgagcggattctgcacagcctcgtgtcaaaagcgctgctgtgtgaggtgggccgcgccgacggtcccggccgggcgattttatacggcacgacaccggtgtttcttgaacaattcggcttaaaaacattggaggagctcccgccgcttcctgaaaatgcggaggaagacgttctccaggaggaagccgatttattctttgaaaacttcaaccaaacttttgaggatattaaataataatcgtttttcatcatacgatagtagggaaaggccattgatgaatgacgcaaatgacgacgtacaagagaggaaggaaacggacggaaatgggaaattcgattgtgagggcccatactgaagaaactggtgaatttttagccgaggttgtcacgatggtcagcagctatttaaatcatacaactttgccggagatgcgggctcaaggagaggcggatgaggcatactgccgcgacgtgctcagtgtgctgaggaggatgaccgtcttttgcgaaggcgcccaggaagcctgccgccggcttttaatgcaggagccgtttcatgaggcgagagcggaaaaaacgctgtataaagtatatcatcagtgcgtggaagagtttttcatgccgaaaaaggatacatggtacgaaaacagccgcgccgcttatacaggccaaagcgcgattgaattctaccagcaagtgccggattcgctgcggagccttctgctttcgctcagcagtgaatttctgcgcatgcgggaagaattggcgcaatatgaagcatcaggctcaaatatggcaccagtcagataaaaactcttccttttgggagagttttttatgtgaaagtgatgcaattggtattcataagtcatggacatgcgcataaacttgtacaaacccacaacaaggacgtgagcattcatgcgctttctcaaaaaagctgccgtatttcttttgacttttgttattcttttttccattacagacggcaatacggcacatgcccaaatacatgtcagcgcaaaaagcgcgattataatcgacggagcatctggcagggtgttattcgccaaggatgaacatcataagcggcggattgcaagcattacgaaaatcatgacggcggtgctggcgattgaatcagggaagatggaagagaccgtgacggtttccccgaatgccgtaaaaacggaaggctcagccatttatcttcagccgggacaaaaagtaaagctgaaagatctcgtatacgggcttatgctgagatcaggaaatgacgccgctgcggcaatagcggaatatgtcggcggaagccttgacggttttgtatttttgatgaacaaaaaagccgagcaaatcgggatggaaaatacaaaatttcaaaatccgcacgggctggacgaccatgaaaatttatattcaacggcgtttgacatggcgcttttgactaaatacgcgatgaaaatcaaggaataccggaccgtttcaggcacaaaagtgtataaggcggaaacgatggaccgggtatggaaaaataaaaacaagcttctgaccgggctctaccgttacagcacaggcggaaaaacgggttacacaaaaatcgcgaaacggacgctcgtctcgacggcctcaaaagacggtacggatctcatcgcggtcaccataaatgatccggatgattgggatgatcatatgaatatgtttaattatgtctttgatcactataaaacctatgtcatcgccaaaaaaggcggcattccgaagctgaaaaagacgttttacggaaagcgcgcttttattgcccgggatgtcaaatatttgttaaaaaaagatgaaatcgacgatgtaaaaatcagcacaaccttaataaaaccgaaaaaagcctggaaaaaggaagcctctctcattcctgatgtcgtcggccggatgactgttatgcatgatgggaaagtgatcgccaagatccccgtctattatgaaaatgagcgccataaaaaaccgaaaaagcatttcattgagacgtttacgagcctgtttatgagcgcggcgggcggttcgtcatggtcaatttaatctgggtatgtctgacggtaatcggacttgtctttgcgatgtttaacggtaccttgcaggatgtgaatgaagccgtttttaaaggagcgaaagaagcggttacgatctcgttcggattaatgagcgttctcgtgttctggctcggcctgatgaaaatagccgagcagtccggccttttggatatattcagcagaatgtgccgcccgtttatttctaagctgtttcccgatattccccctgatcatccggcgatgggatacatcttatcaaatctcatggcaaactttttcggactgggaaatgcggcgacaccgctcggcattaaagccatggagcagatgaaaaagctgaatggaggtaagtctgaggccagccgttccatgattacctttttggcggtaaatacttcgagtattacattgataccgacaaccgtcattgccgtgcgcatggcttattcggcgaaatcaccgaccgatatcgtcgggccgaccatcttagcgactttaatttcgggaatcggcgcgattttcattgaccgctacttctggtaccgccgcaaaagaaaagggaggtaagcgaatggaaatggtgaattggctgtctttagccatgattccgattattatcgccggtatattgatatacggcacgatcaaaaaagtgccgacgtatgaatcgttcgttgaaggcggaaaagaaggaattgagattgcgttttccatcattccgtatttggtcgggatgctggtggcgattaccgtattccgggcctcgggtgcgctggattttgtcatggggctgtgcaagcctttctttacaacgctcggcattcccgcagaagtcgtgccgcttgctctgatccgcccgatttcggggacggcggcgctcggcatgacgactgatctgatcgccgtgtacgggcctgattcatttatcggcagactggcctcggtcatgcagggatcgactgacacgacgctgtatgtcctgacggtgtatttcggggcggtaggcatcaaaaaaatgggggatgctttaaaggttggtcttcttgctgatttgatcggggtggttgcatcaatcatcatagttacgttattatttggaagcgcctgaaatcaggcgctttttatatatcagaataactctccttgaaaaagcttgtttgttcaaggggaaaaaagtaagattatacttgaggtgaacgacatggaaagactgcaaaaagttattgctcatgccggcgtggcatcacgcagaaaggcggaagagctgataaaagaaggaaaagtaaaggtgaatggaaaagtaataacagagctcggcgtaaaagtgaccggttctgatcagattgaagtaaacggattaaaggtggagcgggaagaacccgtgtactttctgctttataaaccgagaggagtgatctcagcagctgatgacgacaaagggcggaaagtggtgaccgactttttcaaagaagtgccgcagcgcatttatccgatcggcaggcttgattatgatacgagcggacttttattgctgacaaatgacggcgagtttgccaacaaactcatgcatccgaaatacgaaattgataagacgtacgtcgccaaagtgaaggggattccttccaaggaacttctgagaaagcttgagcgcggcattcagcttgaagaaggcaagacggcgccggccagagcgaaaatgctttccctggacaaaagaaagcagacgagcatcattcagctgacgattcatgaaggccggaacagacaggtccgccgcatgttcgaggcgatcggtcatgacgtgctgaaactaaaacgtgaagaatacgcatttttagatttaagaggcctgcgcacaggagacgcaagagaattgtcgccgcatgaggtgaaaaggctgcgggctttagctgaacacggtaaaaacgctttctaattttcacataaccttcaaaaattacaaaacgtgttgatgatataattgaatggatttgcaggcaggggaggggagcagtgtacaatgaacaaaaaacggcggcgtttattcattcggaccggcatccttctcatcttactctgcgcgctcggatataccatctataatgccgtatacacaaacggtgagcgtatatctgaggggtccaaagccccgaatttcgcgctgaaagatacagagggcagactcatagaactgagtcagttaaaaggaaaaggtgtttttctgaatttctggggaacgtggtgtgagccgtgcaagcaggaatttccctacatggagaatcaatacaagcattttaaagacctcggtgtcgaggtggttgcggtaaatgtcggcgaatcaaaaattgcagtacataattttatgaaaacatacggcgtcaatttcccggttgcgctcgatactgaccggcaagtgctggacgcgtacggcgtatcacctattccgacgacatttttgatcaatcccgacggaaaagtcgtgaaagtggtgaccggcacgatgacagaacgcatggttcatgactatatgaatttaattaagccggaggcgtcttcatgaaaaaggtcaaatgtgaatgcgggcacgtgaatccagccgggacggttttgtgcgagtcgtgcgggaagccgcttgatgatcaaaaatcgccgcttgccgatatgcggtacgacggcagcgcaaggcgttcgcaaacatataataaaacaatcgtagataaggtatggaacttcttttcttccgtaaaagtcggaatatggctgatcgtcattactctggcggcgtctgctttcggcacggtttttccgcaggaagcttatctgccgccgggcgcccagccggatacatattatgaacagcagtacggcataatcggccaactgtattatctgttgggatttcatcacctgtacggctcatggtggtatatgctcctgatcgcatccattggcatatcactggtcatctgcagcctggaccgggtgattcctttgtacagggcgctgaaaaatcaaggagttcggcggaatccggtctttttgaagaggcagcgtctatacagccggacagaaaccgagctgagcggggatgcggctgatggcctcagaacacgattgaaaaaaaagcattatagagtgcgagaacaagagggaagcattctggcggaaaaaggccgtttttcaaggtgggggccctacgtcaatcatatcggcctaatcatttttctgatcggagccatgctgagatttgtacccggtatgtatgtcgatgaaacgctctgggtccgtgaaggcgaaaccgctcagatccccggcactgacggcaaatattacttaaaaaacaaccggttcacgatgcagacatataacaaagacactgagaaaaaagtattcgccgacgccattgacagagccggaaacggcaaagtcgccaaatccttcacaacggacgcggttttgtacaagagggaaggcgacattgtattcggtgaaaagccgaagcttaaaagagtcaaagaaaacaatatccgcgtcaatgaaccgctgcgttttgactcctattctgtgtatcaggtggactataaagaaaaccagctcgatcagatggtatttcagctgatcgaccaaaaaacaaaacagtcattcggcaaactgaagatcaatcttcttgatcccgacacggactatgatcttggtaacggttacaaagtgcagatcgccagttatcttcctgatttttattttaacaaggacggagaaccgagcacgaaaacgaaggttcctaacaatccggcttttgtctttaaaatcacggctcctgacaagccgaaaggggagaaaagttttgttgcgattcagcagactgttgaaggttccgaaagtaacaagtacaaattaaaattcgaccatgtggaaacgaaaaacattacaggactcaccgtcagaaaagatttaaccttatgggtgcttgccgtcggcggcgcgatctttatgatcggcgtcattcaaggaatgtactggcagcacagaaggatctggatcaaaacaggtgatcatgaagtgcttgtggcgggacatacgaacaaaaactggttcggtctgaaaaaagatatcgaatttgttcttagcgggaccgggattcaagagccagccgatcaaaaagaattggccaaaaatcaggcctagtgaaaaaggagtggtgtcatggcggagctgagcgcaaattttctttatgctgcctttttgatttatttaattgccgtcccggttttcggcggcgccatccggggaacaaaaggtgctaaggacggtaagggccgctggtcggctatcggaatcacgttaaccattttcggatttctttgtcatctcggctacttcattgcgagatggtcggcaagcggacatgcgcctgtcagcaatatgtttgaatttacgacgtcattcggcatgatgcttgttctcgcttttattattatttactttatttacagactgccttcattaggcatgttcacattgtctatcgcgcttttgcttatcgcatatgcaagcatgtttccgacagacattacgccgcttattccgtcactgcagagcaattggctgtacattcacgtcacgacggcggcgctcgggcaggcgattcttgcgatcagttttgtagccggcgtcattttcctgttaaagcatgtcgaccaatccagaccgggcaaaaaaacgttctggcttgaagtcatcatgtttatactcgtgacgaccgtggcatttatcgccgtcacgtcggcattccggctggcggactacaaagctgaatttaattgggtggataaaaaagaagctaaaagcgtcatgatatatgatatgcctgcgcttgtcggcccgcatgagggagaactgcttacggaaggcgcaatgaagccgcttattgagcttccggccattttttcaggcagaaaggtcaatacggtgatctggtcgtttggcgcaggtctcgttttatacggtgcgctcaggctgatattcagaaagagaatcagcgctcttatcagcccgctcgtcaaaaatgtgaatctggacttggtcgatgaagtcggctaccgcgctgtttccatcggttttccggtatttacactcggcgcgcttgtgtttgcgatgatttgggcgcagcttgcatggacgcgtttttggggctgggacccgaaggaagtatgggcgctgatcacctttttattttacgcagcgtatttgcacttgcggctgtcaagaggctggcatggcgaaaagtccgcgtggcttgccgtcatcggcttcgccattattatgtttaacttaatttttgtgaatctcgtgcttgccggacttcattcgtacgcatagatgcaaaaagccgatacagttctcaagctgctgcacagtttgttaaaatgaaagtaacagaaggaaagcagggggaaaacgatggatcaaacaaatgaaactaaaatattagtagtagatgatgaagccagaattcgacgccttttaagaatgtaccttgaacgggaaaactatgtgattgaagaagcggaaaacggcgacgaggccattaaaatggggctggcatcagattatgatctggtgctcttggatttaatgatgccgggaacggacggaatcgaagtatgccggcagctcagagaaaaaaaagcgacgccgattatcatgctgacggcaaaaggggaagaagccaaccgcgtccaggggtttgaagcgggtacggacgattatatcgtcaaacctttcagcccgagagaagtggtgcttcgggtaaaggcgcttttaagaagggcttcccaaacatcttatctgacagccaataccccgacaaaaaatgtgctcgtcttttcgcatctatccattgatcacgatgctcacagggtgactgcggacggcacggaggtgagcctgacgccgaaggaatatgaactgctgtacttcctggcgaaaacaccggacaaagtgtacgacagggaaaagcttttaaaagaagtgtggcagtatgaatttttcggagacctcagaacggtggacacccatgtcaaacggctccgtgaaaaattaaataaagtgtccccgggggcggcgaaaaaaatcgtcaccgtatggggagtcggatacaaatttgaggtaggcgctgaatgaagttttggaaaagcgtagtaggtaagctttggtttaccattctttcactcgtgttaattgttttatttatattaacggtgctgcttctggaatttatagaaaattaccacgttgaagaagcggaaaaagatttaacgcagcttgccgataaaattgcggtcataatagaaaatcatgaagaccagccgcttgccagatccatcacgtgggaactggcggacaatttaacgagcatcgcgatcattcaggatgataagcatgtctggtattcgcccaatgacgataatcatttatcctctattacattagagcagatcaaacatgaccgggatctgcacaaggcgctgacagaccgcaaaaaagtaagcaaacgcgcggtccccaacaatgccggttcggataacgaacggctgatcgtcggagtgccgtatgaaaaagacggcaaaaaaggcatggtctttttatcccaatcgctgcttgccgtcaaagatacgacgaaacatacgacacgctatatttttcttgcggcgggcattgccatcgtcttgacaacgtttttcgcgttctttttatccagcagggtgacatatccccttcggaaaatgcgggaaggcgcccaagacttggcgaaaggaaagtttgatacaaaaattccgattctgacccaagatgaaatcggggaactggccattgcctttaatcagatgggacggcagctcaatttccatattaacgcgctgaatcaggaaaaagaacagctgtccaatattttaagcagtatggcagacggggtcatcaccattaatatcgacggcaccattttggtgaccaacccgccggccgaacgttttctgcaggcatggtattatgagcagaacatgaacattaaagaaggagacaaccttccccctgaagcaaaagagctatttcaaaatgcagtgaacacggaaaaagagcaaatgattgaaatgacgcttcaaggaaggtcatgggttttattgatgtcgcctctttatgcggaatcacacgtccgcggcgccgtggccgtgctccgtgatatgaccgaagagcgcaggctggataaattgcgtgaagacttcattgccaatgtcagtcatgagctcagaaccccgatttctatgctgcagggatacagcgaagcaatagtggacgacattgcaagcaccgaagaggagaaaaaagaaatcgcgcagatcatttatgatgaatctcttcgcatgggccggctcgtcaatgatttgctggatttggccagaatggaatccggacatacgggcctgcactatgaaacggtaaacctgcatgaatttctggagaagatctcccgcaaattttccggggtagcgaaggaaaaaggcgtttcgctcacagaggacatctcagtgtctcagccggagtgtgtctttgatgaagacaaaatggaacaggtgtttaccaaccttatagataatgcgctgcgccatacggagtcaggcggaagcgttcatatcgcggctcagaccgtaaaagacggactgaaaatcgatattaaagattccggctcgggaataccggaagaggatctgccttttatttttgaacgtttttataaagcggacaaagcaagaacaagaggcagggcgggaaccggactcgggctcgccatcgtaaaaaatatcgtggaagcccacggcggctcaattgcggttcacagcagcatcgacaaagggacgacgtttacattttatattccgacaaaagtgcaggatgacgtctgaaattgacgaacaatcttgttccatacgaaacacccgcatgttctgcgggtgttttttatttgtttctcctttaaaaatttaagaatatgttaatataaattcccttccaaattccagtttctcgtaatatagttgtaatgtaacttttcaacgcatttttacgacaaaaaagtgaacggaggggtttcccatggaagaaacctttcagatattatatgatgcataccatcaagatttatatcaatttttattttatatggtaaaagataagtcgcaggctgaagatttgacgcaggaagtgtatatccgcgtcttgaattcctatcatacatttgaaggaagaagcagtgaaaaaacatggctgttatccatcgcacgccatgtggcgattgactggttccgcaagcagcagacgatcagacagcgtattatgggtacgtttgattgggatacacaagatgtcagagatcagcatttgcttccggatgaactcgccgtacagcatgaaaacgtccgggaaatatataccgcgcttgatcattgcaccattgatcaaagagctgttattatcttgagatttattcagggatattccattcaggaaacagccgccgctctccgcttctcggaaagcaaagtcaaaacgacccaacatagagggctcaaaatacttcggaaacagatggagcttttgagggaggagctaatggatgatgaagtcatattggaacgaagaaagagtagaggagttgttaagacaacttccggcggttagagatcatcgttcacccgaggccatttaccggaatattgaaacaggtaaaccgtacaggaaaaaaccggctcgaagctggatcggccccgccgcagccggcgtctgcgcattgtgcatcgctctgattatatctcctcacctgatgacaaacaaatctgccggtgatcttacagctgacagcggtcaagctgaaaaagccagtcagtcagctgctgtcaagccggatcagaagacgtttgtcgtttctaacgaaaacaaaaacaattacattactttggcgtttgccgattcagatacatccgccgtcataccggtcagttttgaaaaaaagaagccggatgaatcggtatcagaggctttatccgaagcagaaaacctagaagtgcccgaatccttcctgtctgtgccgaaccttttggaaggtgtgcaggtaacggcggataagaaggatttgcttgtgcaggtaaacggacggctttctatcgaatcagttgccgatgctgacttattgaaaaagatgctgaaagagactttgacatggagtccttacgagcggattaaattgaaaaaggttcaaaacggagccggacaggatttttataaatcttacggcatatccgctgagatgtccgtacataaacagacaaaccgggcgtatttttcttatagcgacagtctgggacaagagtatctgatcccgtctgaacaaacctattattcagtatatcaggctattgacgggatgaagacaacagacggaggctcacagaccgcgagcattatagaagccgatgcgattgcatcggtatcggaaagggaagacggcgagcagctgcggattcaattgtccgaaaaacataaggttgaagattcgctggaagggattttaatgatcgaagggcttctgttaactgcgaaggaattcggttattctgaggtgctgttcacacatgcgcatacaaagaaaatcggtaattatgatgtgacaaaacctatcgctgtgcctgccgcgcctaatccgcttccaagccattaaacgtaaaaaaacccaaaacttatgaatgttttgggttttttgttggttacggaagatcaatcagtttaacggaaacaatatcctgaattgaagtcagctcattgacgactttatcatctaaatgtttatcaaaagaaagcatcataatggcttctccgcctttttctttacggcctacctgcatggtagcgatattgatatcgttatcgccgaggatgcgtcctacgcgtccgattacaccggtcgtatcctggtgctggatataaacgaggtggccggcaggatttaagtcaatattaaagccgttcagttcaacgattcgttcaccgaagtgagggatatacgtagccgttaacgtaaatgtgctccggtctccggttacttttacgctgatgcagttatcatatcctgattcattggaggaaatcttctcgctgaagctgattccgcgttcttttgctacaccgccggcgttcacttcattgaccgttgagtctacacgcggttttaagaaaccggacagcaggctttttgtaataaatgatgtttcaagtttggcgatggtgccttcatattgaatcgcaacatctttgacgggttccttcatacattgtgacacgagacttccgattttatcggcaatttggtgataaggctggatttttttgaattcatctttcgtcatcgcaggcaggttgatcgctgacatgacaggcagaccttttgcaaactgcagcacttcttcagaaacctgtgccgcgacattcagctgtgcttctttcgttgaagcgcctaagtgaggtgtggcgatcaccagcggatggtcgggaagctttgattcaactggcggttccacttcaaatacgtcaagggcagcgcctgcgacatggccgctttccagcgcttccaaaagcgccgcttcatcaataatgccgcctcttgcgcagttgataagacggacgccttttttcgttttggcaatggtttctctgttaagcagtccttttgtttcctttgttaaaggcgtgtggacggtaatgatatccgcgctttcaagcacttcttcgaatgtccggctgtttacgccgattttgccggctctctcttcggttaagaaaggatcgaatacatgaaccgtcataccgaacgctctggcgcgctgggcaatctcgcttccgatccggcccagaccgacaatgcctaaagtctttccgtagagctccgccccgacaaaagccgtccggttccattctcttgattttactgagatattggcttgcggaatgtgtctcattaatgaagaaatcatcgcgaatgtatgctctgccgttgaaatggtgtttccattcggcgcgtttatcacgataactccatgttttgtggcctcatcgatgtcgatgttgtctacgccgacaccggctctgccgacgatttttaaagaagtcatttttttaaacaattcttcggttactttcgtggcactgcggactaacagggcatcaaaggtatgtaattcatcttctgcatccgcgacgtttttttgaacaatttctataaagtctgattccatcagcggctttaagccgtcattgctcatcttatctgagaccaaaactcgaaacattgttagatttcctcctagtttagctgactaaatatctgataatttatcatattctcaatagagtgtcaatgtgtattgacgcagtaaaggagaaaaggaaaccgctgaatcagcttaaattgggcttccccaatattttatttaaatttgagcagttctctatacaattgcaacttgatcatatataatgtgaataaattcataagatcaatcttcggggcagggtgaaattccctaccggcggtgatgagcatcacgctctaagcccgcgagctgcttcggcggcaggatccggtgagattccggagccgacagtatagtctggatgggagaagatggaggttcagcagacgttttgatgcttatatcaaacgtttctttgccaagccttagtaagctcccgctttttaacaaaagcggtttttttattggggcgcaaaagaacctttcctcttttcgagagatttgatcgaaaaggagagagcattgtgaaagtaaaaaaattagttgtcatcagtatgcttagcagtattgcttttgtgcttatgctgttaaatttcccgtttccggggctgccggattacttgaaaattgatttcagtgacgttcctgcaattatcgccattttggtttacgggcctgcggcggggattgcggttgaagcgattaaaaatattctgcagtatatcattcaaggaagcatggccggcgtgcctgtcgggcaggcagccaattttatcgcgggaacgctgtttattctgccgacggcgtttatgtttaaaaagctcaattcgacaaaagggcttgcagtgagcctgctggccggaaccgcggcgatgaccgtattgatgagcattttgaactatattcttatcctgcccgcgtatacttggtttttacattcaccggcactgtcaaacagccagttaaaaacggcggttgtcgcaggaatcctgccgtttaacattgtaaaaggcgttatcatcaccatcgtctttacgttcatctttacgaagctgaaaccttggattgaacaaaaacgcagcatccagacacaataaccactccaaagcgcccgctctgtaaaacacagaccgggcgcttttttgattgtttgatcacgcaaaaaaaataagactccggccgataacagccggagtcttattcaggacgaaaaagctcctctcacggggagggcttttttattcgtatttcagcgggtcgccttcgaatggttcatccgcaactttgattgaatcagtagggcatccttcaaatgcgtcaatcatatcttcttccagaacttccggaacttcgacgacgcctttattttcgtcaagcgtaacgaacgcaatgccttcatcatcataatcataaatgtctggtgccgcagctccgcaggcgccgcatgcaatacacgtatctttatctacaattgtgtactttgccatgaataaaacctcccagattgttcgtgttggaacaaatggtttaccttatatatttttaaatataacacctattcctcttacttattgtaatgatgttagtgtcaaatttcaacagaaaaatgattgagaatgcttatcacataagggattctctttagcacttccccctaaaagatgactttaaacgtcaaatttatatgaaaatctgttaaaataaaaagaaccaaaaaacgaaacttgtcacagaagaaatgtaggtgtgtttagattggcgataaactactttgataccgtggttctcgactgtctggacaaaatagacggcgaacggactccgagtgctgtgtttcatttattaaaaggaaaaaagtcgtctcaaaccattcaggatgccggcttatttcagatcgctaaatatttcggcatggcttcacattgtgaacgcggcgatattgcggcttctttgcataaactcaccgagaactcatacattacagccggaaaagaagagggaacgtggaaagtgactgcgcgcggcgttcaaaagcttgaacgggcgtttgccgagcggccttggccgaagcactgccacggcgcgaattatcaaacgcctgctgttaccctgtggaggcggctttccctgctcattcaagtcctgtcaaacaaagagcatcaatgtaatcaatatatcccggttaccaacgatgtgcagacgctgagatgggtcaaacggttcatacggaaaaacatagacgctaaagagctctccgtccaaatgcatgagacgctgtttcaccttctgcaaggcgtaagtgaacggcaggcgcttatttttgtctattctttaacttcattcaacagaatcggcaaaacgaataagcagctggctctccagctgaacgaagatgaatggtatgtgtccgtccagttttggggagcggtacattatgttattcaatcgcttccgcaatgtgcatatcccgctctgcgcgagctgttgtccgatctgcaggcggaaagcgcgctgacacagtctgccagaaaaacctttgagctgttggaaaaagggtttccgattgaacggatcgccgcggtcagaaatttaaaaaccgccacaatcgaagatcatatcgtagaaatatcattgcatcagcctgcattttttacagaacagtatctttctgaagaggaacagcgtatgataacggcatttgcaaaacagcatcaaacgaataaaattaaacggattcgcgaaggaatgcagatgcgcttcagctattttcagatcaggctggcgctggcaaagacggtgaatcagcatgactgagctgcataaagctttatccaggtattttggtttgcattcctttaaaaaagggcaggaagagattatgactagcgtgctccaaaaaaaagatacgatcgccatgcttccgaccggcgggggaaaatcattatgctatcagctcccgggttacatgatggacgggctggtgctgattatttcgccgctcctttcattaatggaagatcaggtgcagcagctgaaagcgaaaggagaaaagcgggttgctgcattaaacagcatgctgaattccgcagagcggcattttatcctcagcaacatcagccggtataaatttctctatatgtctcctgaagccctttcttcaccttatgtgctgaaccgtttgaaaaatgtcccggtcagtttatttgttattgatgaggctcattgcatatcagaatggggacatgatttcaggcctgattactcgaagctcgggcctttcaggcaggcactcggaaagccgcctgtattggcgctgaccgcaacagcgacaaaagaaacgctcagagacgtgacggatgtgctcggacttgagcatgcggtgcgtcatctttattcagtcaaccggccgaacattctcctggcggcagaacatttggctgataataccgaaaaaataagcaggctcacggagcttgccgaaaagcttgaaggcccgggtatcatatattgtccgaccagaaaatgggcggaagagcttgcggctgagctgaacgaaaaaacgggaaagcggacggattattatcacggcggaatggatacaggcgacaggattttaatccagcagcaatttatccataaccagcttgattgcatctgctgcaccaatgcgttcggcatgggtgtggataagtcagatatccgctttgtcattcacttttatcctccccaaacggccgaggcctttatgcaggaaatcggcagagcgggacgcgacggcagcccgagtgtcagtattttgctgagggcgcccggcgataccgagcttcagcagcagattattcagacagaaagcctgtctgattatgacctggaaggcattctggccgtcatacgggatgccggtacgagtgatgaacgaaagcttcgggacgttctgatcaataagggcgtccaggaaacacaggcgcgaacggccgtccatctgtttctgcaaggaaaaaccacaaaagaccagctgcaggaagaactgacataccgcgtggaaaagaagctgcgtaaaatgaatcgtttttcggcgttattagagcggaaagaatgtataagagaagcgctgctgtcttattttgatgaaccgtatgagcctgatggtcaaaccggacaatgctgcagcagctgcggacttgatctggctccgtacgagcaaaaaggagaacgtaaaaatatggaacggtttgaagattggaagctggaattaggccggattttcggatcagagtctgcgggtgagttcagctgagacggcaaagcgaattgatccggcagctctcagaccgggagattgtgatgcagctgtatgccacccaattgctcatattggcggtttcagctgttatcggctttttcttttttaccgacattcacgattttttaaagctgtggcatatacgtgacgataatatcatatggtacggtgtaactcttgccgtccttgtcatttttgccgatctggcggtgatgaaatggtgtccttcgcatttatatgatgacggcggcattaatgtattgctttttaagaacaggccggtgctgcacattttgtttttgacgctcctcatttcgttcagcgaagagattttgttcagaggcgttctgcagacacatatcggcttatgggccgccagcttcatttttaccgtgcttcatttcagatacttggcgaagtggcttctgtttatgatggttgcgggtatcagtcttttgctggggcttatctatgaatggaccggcaatttattcgttccggttacagcgcattttattattgatgcggtatttgcctgtcagatccgttttcaatatgttaggaggggtttgcatgacggaaatgtcaagagttgaaagaagaaaagctcagctgcgtgccgagcagcaggttgccgcggccgcggatgaacaaattgaatatcttgaagacagcctcccgacaagacaatctgtaaaagaggagcgtaaaaaaaaggaagagcaggtgaaggaaaaaaccaaaacaaaaacgccgctgttcacttttctgaccgtcctgttcattatcgtaacaatcggtgtctttttcggtcttctttatatgacgaacagcagcagatttgacccgaaggactatgaagatgtcttcatagaccacagtgaaagcgcgcctgccgttattccgaaaggcgctcagaaaaaaacgtcagaaaccgctcttttagaacaaccgaaaaaaaagtctgacgacaaagataagaaagaagcggctgcacctgaaaaaacgaaagaaaaaccaagtgaaaaaccaagtgaaaaaacacctaaaaaaacggaaacgccctcagaaaaacaagtaaagccgacagacaccgaatacgcggagacaaaacagcagtctccgccggctgtccgtgaaaaagcggctccggctgaggcgagtgatcaagccgggactgtcccaaaaaaagtgcggaccgtacagcatactgtacagccgaaagaaacgctttaccgtatttcaatgaaatactataaaagccgggcgggcgaagaaaaaatccgcagctacaacggattaaacggaaacgacgtgtacaccggccaggttctgaacattccgctgtctgattaaaataaatgcatgttttcaccgcgtttttcatatagtgtaccaatgaaaacggacaaggtgtgaagcgcatggattctttatggaagcaattagaccgatttgctgacggaccgacgaaacagatgcttcaggcgctggtgaaacggaaattaaaatacgaaaattatgccgcacaatgccgaagatggcagtgggcgtccctcgtttgtttttccctgatgtgcatactgctgatgtttaaaagctttaatgccccccaagcctctccgcagctgattctgcaggaaatattaggccatacggtttacttgtgctggattatggcttccgcttttgcgtattgcacttcttattattttaaaaaaaaggaagaaaaagctgagggtgaatttcataaactgagatgtgaaattatccaaaaaagcacggatttatggccccagcctgaaaaatggagggcgagagaatctgtttttcacttgatgaaacatcggtatgatatcaatctttattttgaaagcaaataaaatgaggcgttttccggaaaggatagaaacgtctttttttgtttgtccgtctaatataagacaatgacagaatggagagtgcgtttatgaagcttacagcgggaattctcggctcattggcgggagcggctgcggttatggcggccgttatgtacaaaacggcaaacggcagccatctgaaaacacatacatttacgcttgataaaatgaaggggatgaagccgctcaccatcttttttatatctgacgtgcaccgccgtttaattgatgaaaagcttctccgcgaagcggcaggttataagccggatgccgttttgctcggcggtgatttggcggagggcggagttccttacgccagaattgaagaaaacatcaaacgtctgacggctctcgcgcctgtcatgtatgtgtggggaaataacgattacgaggtcagccagcaaaaactgctctctcttttacgggcatacaaagtgatcccgctgagaaatgaatcggttcagtttacttataaaggggaaaccgttacgatctgcggcgtggatgatatcaggatgatgatggatgattatgattctgcaatcagatatacggatgctgacaaagtaaacctcctgctttgccataaccccgacatccatgagcagatgagggagtcagacgggattgacgctgtgttcagcggccatacgcatggcggccaaatccgtttcggacggttcgggccgtacgaattgggcgggacgggaacggtaaaaaaagcgcattacctgatcagcaacggctacgggacgacaaaagttccgctgaggctcggggcgaaaccggagacgcatatgattacgctgtgcggaccggatgagccgtcttcctgaaacaaacccggccgaggtgataaaaaacggcattctgcttgtcttcccgctgtacacggtgtaaactgataacaaattaagaacctatgattcatttattcatatactgtgttatatgatttgtgtgcaagaagaggcaggagggaacattatgcggcttgagcgtctgaactataataagattaaaatctttttaaccctcgacgatctgactgatcggggactgacaaaagaagacctctggaaggactcgtttaaagtccaccagttatttaaagatatgatgaatgaagcaaatacagagctcggctttgaagcgaatggtccgatcgcggtggaagtatattctcttcaggcacaaggcatggttgtgattgtaacgaaaaatcatgacgcggacgcagaagatgacgaatatgacgatgattatatcgagatgcaggtcaaacttgacgaaagcccggatattatttatcagttccattcgtttgaagatatcattcagcttgccggaagccttcaccgaatcgggattaccggcggcaccgtctaccactatgagaaccaatactatgtaagccttgaagacctcggctcccgttccgccgaaggcgtcatcgcggtgctggctgaatacggacacccggcgacgattacgatttacaggctccatgagtacggaaaactcatcatggacggcaatgctgtggagaccatccagaaacatttttcataaaaaagatttgaaacggcagctgttttcagcggccgtctttttttaagcgaaataatggaaaaatcattgtctttcttctatgcacggagatattgaaggtgtatactagtcactgaaagggagcatgagagaaacagaagattttaggaggttaactcaaatggcagccgatcgattcaccggtcataatgaagaagacaaacatgatgtattaaaatcaacccaaaccgtaatacataaagctctggaaaaattggggtatccagaagaagtgtatgaactgctgaaagagccgctcagattattaacggttaaaattcctgttcggatggatgacgggtctgtgaaaatatttacaggctatcgtgcgcagcacaatgactccgtaggtccgacaaaaggcggcattcgttttcacccgaatgtaactgaaaaagaggtgaaagcactttccatctggatgagtttaaaatgcggaattattgatcttccttatggcggtggtaaaggcggaattgtttgtgatccgagaaatatgtcattcagagagcttgaaaggctgagcaggggatatgtcagagcaatcagtcagattgtcggaccgactaaagacgtcccggcacctgacgtatttacaaactcgcagattatggcttggatgatggatgaatattcaagaattgatgaatttaactcacccggctttattacgggaaaaccgcttgtactcggcgggtcccacggcagggaatcagctacggcaaaaggcgtcaccatctgcataaaagaagcggccaagaaaaaaggtctcgatattcagaacgcgcgcgtcgtcgtacaaggtttcggaaatgcgggcagctatctggccaagtttatgcatgacgccggcgcgaaagttgtcggaatttctgacgcgtacggaggcctttacgatccggacggtcttgatattgattatctgcttgaccgcagagacagcttcggaacggtgacgaagcttttcaatgacaccattacgaatcaggagctgcttgagctggactgtgatatacttgtcccggcggcgatcgaaaaccaaattacagaagaaaatgctgaccgcatcaaagcgaaaatcgttgtagaagcggcaaacggaccgacgacactggaaggaacgaaaatcctgacagacaaaggaacgctgctggttcccgatgttctggcgagcgccggcggtgtaacggtttcttattttgaatgggttcaaaacaaccaaggcttctactggagtgaagaagaagtcgaggaaaaactggaaaatatgatgataaaatcgtttaataatatttatgaaatgtcccaaaaccgccggattgacatgaggcttgcggcttacatggtcggcgtgcggaaaatggcggaggcttcgcgtttcagaggctggatataaaccaatcgtttgcataaacaaaaaaaatctcctatgataatataggagattttttatatgagtggaaacttatgatggaaatgccaatcgcaggagttgaaggacatgacagaagaaaaagcaattataataggcggaggtccttgcggattatcggcggctatacatctgaagcaaattggcgtgaacgcgcttgtaatcgaaaaagggaatgtcgtaaacagcatttataactatccgacccaccaaacttttttcagttcaagtgaaaaattggagatcggcgatgtcgcctttattacggaaaacagaaaaccggtccgaatacaggctctctcttactacagagaggttgtcagaagaaaagagctgcgcgtaaacgcctttgaaacggtggaacgcgtaacgaaacaggaagacggccgttttcttgtagaaacatcaaaagaccgctacctcactccgttttgtatcattgcgacaggatattatgatcatccgaattatatgaacataccgggtgaagggcttcctaaggtatttcattactttaaagaaggccatccttattttgataaagatgttgctgtgatcggcgggaaaaactcaagtgtggacgcggctttggaactggtgaagtccggtgcgcgcgtcacggtgctctacagaggacatgagtactccccgagcatcaagccgtggattctgcctgagtttgaggccctcgtcagaaacggcacaatccggatggaattcggcgcttgtcttgaagaagtgacggaagatgaaatcattttccgctccagccgaaatgagacggtccggctgaaaaacgatttcgtatttgccatgacgggataccatcccgatcacggtttcctcgaaaaaatcggtgtgcggattgatgcggaatcaggccggccgtttttccgggaagaaacgatggaaacaaatgttgacggtgtttttatcgccggagtcattgcggctggaaataacgccaacgaaatttttatcgagaacggccgttttcacggcggcttgatcgcaaatgaaatatcaaaacggctgggtgcagagagcatatgatcattcatatgctcttttttaaaaaaattgaaagatgtaaaaatgtgaacaacatggtacgatagatataggaatataaaggaaagaggttgcctgatgtttgcaatcatctctgcaggaattgctcccggcattgcgctgttaagctatttttatttaaaagatcagtatgacaatgaacccgtacatatggtgctgaggtctttttttctcggggttgtccttgtgtttccgaccatgtttatccaatatgttcttgaaaaagagcatgtggggggaggaagctttttcgtttcgtttttgtcttcgggatttctggaagaatcggtgaaatggttcgttctgatgatcagtgtgtatccgcatgctcattttgatgagcattatgacggaatcgtttacggggccagtgtgtctttaggatttgccacgcttgaaaatattctgtatttattcggccacggcgttgagcatgctttcatcagggcgcttctgccggtctcctgccatgcgctgatcggagtgattatgggattttatctcggaaaagcccgcttttcgcagaaaaaagcccgtgtcaaatggcttgtgatttcgctggccgtgccttcatgtctgcacggttcttacgattttattcttaccgccctcaatcattgggtatattatatgctgccgtttatgctgtttttatggtggttcgggctgcgaaaggcaaaaaaagcacgctccgtcaatatgatccaagtgtgaagaaaccgcgcgtcgcgtgcggtttcttttttatgccttgacaggggataagaaggaaacgtgcataaaaataacctcgtgacagacaatacgggtacactttaaattttgcagtaggaggcttgaagagatgaagtgcaaaggagcctttatggcatgtctcattctattttctttcgccgccgctttcttcgatcatcatgaaacggttcatgcgttttcaaatcaagtgattcaaagaggcgcgacgggtgatgatgttatagaattgcaggcccgtcttcaatataacggattttataacgggaaaatcgatggtgtttacggctggaccacatactgggccgtgagaaattttcaggagaaattcggcatgaagccggttgacggcctcgtcggcgcgaaaaccaaacaggtgctgatttctaaatcaaaatattaccgtgaatatgtaatggagcagatccaaaaagggaatacgttcactcattatggcaacgtcccattggaaaaccaaacaaaaccgagagccggaacgcagaagccggcgggaacgaataagcctgctcaaaagccgcaaaacaatacaggcggtcagtcaaatcaaaagcaaaatacgacagcggccaatatgcctggcggtttctcaaacaacgacatcaatcttctggcacaggctgtgtacggggaagcgcgcggtgagccgtttgaagggcaggttgccatcgccgcggttattttaaaccgtattaaaagcccgttatttccgaatacggtggccggcgtcattttcgaaccgctcgcgtttaccgccgttgccgacggccaaatatacatgcagccgaatgaaagagcaaaagaagcggttcttgatgcgatcaacggctgggatccttctgaaaacgcgatttattatttcaatcctgatacggcgacaagcaaatggatttggggacgtccgcaaataaaaagaatcggaaaacacattttctgtgagtaaaagtacgcaaaatgaggtgttaacatgattagaggaatcattatcgctgttctcggtgtcgcgatcgccgcaaccggatactggggatataaagagcatcaggaaaaagatgcggtccttctgcatgcggaaaataattatcagagggcttttcatgaattgacgtaccatgtagatcagcttcacgacaaaatcgggacgacgcttgcgatgaacagtaaaaaatctctgtctccggcgctcattgatgtatggagaataacatctgaagctcataacaatgtgagccagctgcccctgactctcatgccttttaataagacggaggagtttttatccaacataggagatttcagctataaaacatccgtccgggatttagaccaaaaaccgcttgataagaaagaatatacaacactgaacagcctgtacaaacaggcggagaacattcaaaaccagctccgcagcgttcagcatctcgtcatgagcaaaaatttacggtggatggatgttgagatggcgctcgcctctgacaaaaaacaaagcgataatacgatcgtcgacagctttaaaacagtcgaaaaaaatgtaggcgctttttctgaagacagcatcagccccacatttacgggagcaaatacagaacgaaaaggttttacgcacctgaaaggaaaacaaattacggaaaaagaagcggtcaaaatcgcgcaacggtttgcgcctgatcataattattcaattaaagtggtcaaaagcggcaggaaaacgaatcgggacgtatacagcatccgcatgaaagacgcggacaacaagtcttttatctatatggatattacccaaaaaggcggacatccggtctatttgattcaaaaacgggccgtgaagaaacaaaagatcagcctcaatgaagcatctaaccgggccgtcgcgtttttaaagaaaaatggatatgaaacaaaaggcctcgaaattgatgaaagcgcgcaatataataacatcggcgtcttttcttttatccccgtggagaaaaacgtccgcatttatccggaagccatccgaatgaaagtggcgctggatgatggtgaagtcgtcggtttttccgcacgtgattacctggcggcgcaccgcacgagaacgattccggctcccgctctgtcagctgatgaagcgaaagcgaagctgaataaaaatgttgaagtgcgggagacgcggcaggcgctgatcacgaatgagctcggtcaggaagtgctttgctacgaaatgctcgggacgatcgggaaagacacatatcaaatgttcattaatgcggacgacggaaaagaggaaaaaatagaaaagttaaaaagtgcagaacctatatacaaagacctataaaaataaaggaggaaaggactaaaagtcttttcctttttttcgttacatgctttaataaaagcataaataatgaaagagtgaaggcccatgatagctgtcggagattatatttggattgaatacatagagaacaatgagcccaaaaaagcgaggagcaaagcagtaagcgttgaaaacggcgaactgcacatctcatatcccgtcgatctggattcgggacggacggtctttttgcataaaggattggaaataacagcggaatttatgggggatggccaagtgccgtatcaatttaaaagcataatcaaaggaaagaaaaaagaccccatcccgatgatcggattggacatcccccctcaggaggaaatgaagcggattcaaagacgccgatacgtccgtgcagacgcagtattggatgtatccgtcaaaatggaagcgaaaaaaaccgctttccaaacggtttcctctaatatcagcgccggcggaatcgctgttgtgatgcctgagcatatttccgcggaaccaggtgaaaagctttatgtctcattttctcttcccggcaaggaaaatacagccgatattacggccgaggctgttacccagcggattttttatgatgaaaaggcggataaacaaaaaatgacgcttgaatttgcagagatcgatcccgcatcacagcagcttttactccaatattgtatgcgcgcgcagctgcagcagagaagaaacagtctgtcggaataaacagcagcgcacttttccatactaatcctaatggaggtgcgcgtgtatgaaaacgtttgaacgtctgctggtcaaattggtctgcattcagcttatcattttgggcgcggtgcagtttttgcttcattatcagcctattgaaccttatatttcgaaagctgtgaaatatgagggagttgataaaatggagaaaaaagaatggattgaaacggtaaagcggtaaatcagctcaattttttcgccccttttccggcagttcatgatacaatccatagaggagtaaagagcaaggagagagattatggacaagaaattatcaattgcgatcgacgggccggccgctgccggaaaaagcaccgttgctaaaatagtggctgagaaaaaatcatatgtgtacattgatacaggagcgatgtatcgtgccattacatatacggcgctcaagcagaatgccgatttaactgatgaagccgcgcttacagagctgctgaagcgtacggaaattgagcttgtatccgctccggaaggacaaatcgttctggtaaacggagaagatgtgacagaagaaatccgaaaagacgaagtcagcaaccaagtatcaatcgccgccaagcataaaggcgtcagagaagaaatggtcaaaagacagcagcagctcggacaaaaaggcggtgtcgtcatggacggccgtgatatcggtactcacgtgctgcctgacgccgaagtgaaaatttttctgctcgcgtccgtagaggaaagagcgaagcgccgatatgaagagaataagaaaaaaggctatgacgtgaattatgagacgctcattgaagaaattgccagacgcgacaaactcgattcagagagggaagtttccccgctgcgcaaagcggaagacgcgattgaaatcgatacgacgtcactcagcattgccgaagtcgcaggaaaaattctggagatcgtcgaacagaaatcacgttaacttcgggcggagcgctttataatttttttcgaaagacaagatgttattgcttgacaaaccagtccatttattagaagttaatactaataaaactttttattgatcattcaaaatcttttttggatgattctttaatacatattcggctgaaaagcggacattcacatgttcagctttcaaaccgtattaattaagctgtgtaggtttggaccaaggaggttattcaaatgacagaggaaatgaatcaaattgatgttcaagtgccagaggttggagatgtagtaaaagggattgtgacaaaggtagaggacaagcatgtagatgtcgaaattgtcaatgtcaaacagtccggaatcattccaatcagtgaattatcaagtcttcatgtagagaaagcatcggatgtcgtaaaagttgacgacgagcttgacctgaaagtaacaaaagtggaagacgatgctttgattttatctaaacgtgccgttgatgctgaccgcgcttgggaagaccttgaaaaaaaattcgacacaaaagaagtgtttgaagctgaagtgaaagatgtggtgaaaggcggtctcgtcgttgatatcggcgttcgcggcttcattcccgcatcacttgtcgaagctcatttcgtcgaggatttcactgactataaagggaaaaccctctctcttatcgtcgttgaactcgaccgtgataaaaaccgggtgattctgtcacaccgggctgtagtggaaaaagaacagacagccaaaaagcatgactttctccaaacgcttgaggttggaagcgtgcttgaagggaaagtgcagcgtctgactgatttcggcgcatttgtcgacatcggcggaattgacgggcttgttcatatttcgcagctgtctcattcacacgtcgaaaaaccgtctgacgtggtggaagaaggtcaggatgtaaaagtgaaagtactgtccgtagaccgcgataacgaacgtatttctttatctattaaagaaacgctgccgggaccttggagccagatcggcgaaaaggtaaaacagggagatgtgcttgaaggaaaagtgcagcgccttgtaagcttcggcgccttcgttgaaattcttccgggcgtggaaggacttgtgcacatttcgcaaatttccaataaacatatcggaacgccgcatgaagtgcttgaagaaggacagactgttaaagtgaaagtgcttgacgtcaacgaaagcgaagagcgcatttccttaagcatgcgtgagcttgaagaagcgccgaaagccgatcaggaggacttccgccaataccaggcgaaagaagagccgagcaccggcttccagcttggcgatttaatcggagacaagcttaataaattaaaataaattggtgataaaacgtgacacgagcagaacgaaaaagagaacatataaatcatgcgctgtctaccggccaaaaccgggaaacggggcttgatgatattacgtttgttcatgtcagcctaccgaacctagcattggaaaaagtggatatatcaacgaaaatcggcggactcacaagcagttcgccgatttttatcaatgcgatgacaggcggcggcggacagcttacatacgaaattaacagatcgctggcaagagccgcgcgcaaagccggcatgccgctggctgtcggttcgcaaatgtcagctttaaaagatccctccgaacggtgttcttacgagatcgtcagaaaagagaatccggacgggctgatatttgccaatttaggcagcgaggcggatgccgagcaggcgaaaagggcagttgatatgattcaagcagatgccctccagattcatttaaatgtgattcaggagatcgtcatgccagagggtgacagaagctttaccggcgctctcggccgcattgagcggattgcggcggaagcgggagtgcccgtttttgtcaaagaagtcggcttcggaatgagcagggaatcggcacggcagttatttgatgctggcgcagcagcagttgatgccggcggatacggcggtacgaatttctctaagattgaaaatatgcgcagagagaaggcgcttcatttttttaatacgtggggaatttccactgccgcaagcttagcggaaatccattcgctctccgctgatcaatcaattatcgcatccggcgggctgcaaagcgccctggatgtcgccaaatcgattgccctcggcgcttccagcgcgggaatggcgggcactttcctgaaagctctcacctctaaaggagaagagggcctgtttgacgagatgatggcgcttttgcaagagctgaaaatgattatgaccgtcctcggatgccaatcggttgcccaattgcaaaaggcgcctttggtcataaaaggtgacacacatcactggctttctgaacgggggattgacacgtcccgtttcagcagacgttaaaaggcatgcgaacccgcatgcctttttctgttttttacgattttctttttcggaattccccgttctgctcaaggcttgtcgctcctttatggtgaatcgaatcatcgcgatcagattccacccggcgggaggctttcagttttttctcctgtctgtcttttcccatccttatccgctcctttcaggcataattggtttaaaaaatgcgttcccgctccatactgatcagaggaggagcgattatggaaccgttttattattactggtcaatgtggtttttatggatacttgcgacttttatttttgccaaaacgaaaagccgtttttacgtatcagtctttattttgactaatatgatggcaagcatacatcagattacggcttattttacgctgaatgcggcatatgtcatgttttttgctgcggcatttgtttatgcgggaagcctcggcatgcataaacggctccgtaatattgtgattcatctgacggcgtctgcggcgtacggctttatttttctttttgcattatatgatcctgtttggtttatcataaaacctgaatgggcggcggttatactgcttaccgttattacgctttccgttgaggggcggttccctgagaggctttgtctttttgttctcggcatgtgccagggggagctattgtatgctgcggtcatccgcaacattgcgggtgcggcagccgtcggggattatcaatggctttcaggctgttcggcgggagtgattctcctcgtcgggctgactacatatgaacagcttgcggcgcgcatcagccaaaaaagcaaaaagcagggcaaaggagcgacaaaaatgtcttgaaaacagacggagactgttacatgaatgcgaaacattttgaagaatacattgtgatctcagtgaaaactgatataataaatgagttaagcccttctgtttgaagggttcttttcataacgaagatgatttttaataaccggttgaacaattttttgtgaaaatgtaagcggctggattgaaaggaagggtactatgggtaaacctgtcgtagccattgtcggaagaccgaatgtgggaaaatccacaatctttaaccggattgcgggtgaaagaatttcaatagtagaagatacccccggagtgacgcgggaccggatatacagttcggcggaatggctgaattatgattttaacctgattgatacgggcggaattgatatcggagacgaaccgtttctgacacagatccgccagcaggctgaaatcgccatggacgaggctgatgtgatcatctttatggtgaacggccgcgaaggtgtgacgtctgcggatgaagaagtggcaaaaatactgtaccggacgaaaaaaccggtcgtattagccgtaaataaattagataataccgaaatgagagcgaacatctatgacttttatgcgctcggctttggagaaccgtatccgatttcgggcacacacggtttaggattgggagatttgctcgatgcttgtgccgagcattttaaaaacattccggagacgaagtacagtgatgatgtcgttcaattctgcctgatcggccgcccgaatgtcggaaaatcatcccttgtcaatgcgatgctcggcgaagagcgggttatcgtgagcaacgtagccggaacgactagagacgctgtggatacggcgttcacctacaatcagcaggaatttgtaatcgttgacacggcgggaatgagaaaaaagggtaaagtatatgaaacaacagaaaaatacagtgtgcttcgggcgttaaaagccattgaccgctcagacgtcgtcggcgttgtgctgaatgcagaagaaggcatccttgagcaggacaagcggatcgccggatacgcccatgaagccgggaaagccgtcgttattatcgtaaacaaatgggatgccgttgataaagacgagcgcacgatgaaagaatttgaacagaatattcgggaacatttccaatttctcgattacgcgccggtgctgtttatgtcggcactgacgacaaagcggattcatacactcatgcctgcgattattaaagcgagtgaaaaccactctctccgcgtgcagacaaatgtcttaaatgatgtcattatggatgcggtcgccatgaatccgactccgacgcacaacggctcccgtctgaaaatttactatgcgactcaagtcgctgttaagccgccgagcttcgttgtttttgtcaacgatccggaactgatgcatttttcttatgaacgctttttagaaaaccgaatccgggacgctttcggatttgaaggtacgccaattaaaatatttgcaagagcaagaaaataaaaaggtgtgatacagagatgaaaaaagtggcaatgcttggagcgggaagctggggcactgcactttctttagtgctggctgataacggacatcaagtcatgatgtggggacaccgtgccgaattgatcgatcaaatcaacgaactgcatgaaaacaaagattacctgccgggggtggagctatcaagttctatcatcggtacagctgatttaagcgaggctttaaaaggagctgacttcatcattgtggcagttccgacaaaagccattcgggaagtgctgaaaaaggctctgccgtacatcccgaaacaatcgatttttgttcatgtcagcaagggaattgagccggattcgcttctccgcatttcagaattaatggaagaggagctgcctgaggagtacagaaaagacatcgtcgtgctttcagggccgagccacgctgaggaagtcggattaagacacccgacgactgttacatcatcttcaaaaaatatcaaggctgcagaagcggttcaggatttatttatgaaccagcatttccgcgtctataccaatccggatatgatcggtgtggaaatagggggagcgttaaagaatatcatcgctcttgcagcggggattacagacggattgggatacggagataatgcaaaagcggccctaatcacccgaggtcttgctgaaatcgccagactcggcacaaagatgggcggaaatccgctcaccttttccggcctgaccggcgtaggcgatttaatcgtgacgtgtacaagcgttcattcccgaaactggcgcgccggcaacctgctcggcaaaggatataagctggaagctgtcctggataagatggggatggttgttgaaggcgtgcggacgacgaaagctgcgtatcagctgtctcaaaaataccaagtgaaaatgccgatcacagaggcgcttcaccaagtattatttaacgggcagaaggtagaaacggccgtagaatccttaatggccagagtgaaaacccatgagatggaagacttggtcaacacattcgaaaatcgggtgaagtgacaataacatgccgtcagcatattctgaagtgacgaaagtccaaaacgcagaactctccggctgaaatcgcttaaaacatttgctgatttaggcagaagaggatgcagacgtatgcatctgcgcatactatagcatcgaagtccaagagagtgtatctcagacgtacaggtgaatatagtcaacttgactgaagcaaagtccccctctttgcttcagttttttttgttttttcaatagatggaaaacctgttgatcttttcaacatttgtatattaaaatgaaatataacgcttacaatgatgggacggggggcacgaacatgagtgtggcattaatgaaaatgtggtttgcgcttggtgctatgggattaatgtttgttgcggtggcctctatttatgtcagcaggtacaaagtgaaaaacaaactgataaaagcagcggtttcttcactcgcttatgcctgcatggtcatctcgggattgatcgtgttaatggtcgttttcagcgggcctgtcaatgaataaagcaaaaagggggcgcggaatgcataagttaaaaatggccgtcataacggcaatggcggtgcttctgctgtccggctgtctgtaccctgaagcaaaaaaaactgaaaataaagtatcttacaaacatcagcttcagcaggtgcaagcggcagtggatgaatttaaaaaggcgaacggcggacttctgccgattcagacaaaagatatgaaaacaccgctctatcaaaaatatccgatagattttaagcggctcgcgcccagatacatagaggagccgccggcctcagcttatgaaagcggaggaatgtaccaatacgtgcttgtcgatgtggaaaataagccgaccgtcaagctggtcgatctccaaatggcagaagcaatccgcgacatgaagctgcgtgtcaaaatgtatcaggaaaagcatacatatcctccttatgaggacgccgtttcacaagggctgttcactttaaataaaaaaaagctcggcatgaaagactctccttcagtcaaaagtccggtttcaggcacgtctctgccgcttttaatcggcgctgacggagaaatctatgccgactatcgcgtcgatctcgcccgctgcctgaaggaaaacaaaaagaaaatcaaaccgggcgcggaaattcaagatattttatggaaagagactcctttcgtcccggccttttcagtcacatacaccgtaaatgaaaaacaggaacccgtttttttagaaagtcagacgaaacaggaatgaacctttttcccgcgcatacaaatagggagaaaggtttttttgattttgatagaaaagactgcctgaaaattttctaaagatgtcatattgaaataggacaacgtcatacacatatagtgtcctgtatttgattggagaatggtgaatgaaaaatgataaggataggaagtccgggaggggatcacttggaaaaggtcgatattttcaaggatatcgctgaacgaacagggggcgatatatacttaggagtcgttggcgctgtccgtacagggaaatctacattcattaaaaaatttatggagctcgtggtgctcccgaatatcagcaatgaggccgaccgagcgcgggcgcaggatgagcttccgcaaagcgcagcaggaaaaacgataatgaccacagaaccaaaatttgtcccgaatcaagccatgtccgttcatgtcgcggaaggacttgatgtcaacatccgtcttgtggattgtgtgggatatacggttcccggggcgaagggatatgaggatgaaaacggcccgagaatgatcaatacaccttggtacgaagaaccgattccctttcatgaggcagcggaaatcggtacgagaaaagtcatccaggaacactccacaatcggggtcgtcattacgacagacggctcaatcggcgatattgcgcggggcgattacgtggaagcggaagaaagagtcatcgacgagctgaaggaagtcggcaaaccgtttattatggttatcaactcggtaaaaccgtaccacccggaaacagaagcgctcagagctgaattaagcgcgaaatatgatattcccgtcctcgccatgagtgttgaaagcatgcgggaaacagatgtgttaagcgtcctcagagaagcgctttacgagttccctgtgctggaagtcaatgtcaaccttccgagctgggtcatggtgctgaaagaaaatcactggctcagagagagctaccaggaatcagtgaaagaaaccgtaaaagatattaaacgcctgcgcgatgtcgaccgggttgtcggccacttcagtgaatttgagtttattgaaagcgccggattggccggaatcgaacttggccagggtgtcgcagaaattgatttgtatgcgccggatcatttatatgaccagattttaaaagaagtggtcggcgttgaaatccgcgggaaagaccacctgcttgaattaatgcaggacttcgcccacgcgaaaaaagaatatgatcaggtatcagatgcgctgaaaatggtgaaacagaccggctacggcattgccgccccggccttagccgatatgagccttgatgaaccggaaatcatcagacagggatcaagattcggagtaaggctcaaagcggtcgctccgtccattcatatgatcaaagtggatgtggaaagtgaattcgcgccgatcatcgggacggaaaaacaaagtgaagaacttgtccgttacttaatgcaggactttgaagatgatccgctttctatctggaactccgatattttcggcagatcattgagctctatcgtaagagaaggaatctccgcaaaactgtcactcatgccggaaaatgcgagatataaattgaaagaaacgctggagagaattattaacgaaggctcaggcggcctgatcgccattattttgtaagctgaaggacctcttcctgaaacggggggtctttttttattctttttagatactggaaatcaatcaaggattaggaggaaaaaagcaaaaaaaggaatatttgttcggtaaaacacgtgaaaaccttgacgagcaagggattgaggctttaaaatgcttgatatggctttttatatgtgttactctacatacagaaaatcttcactttgttggacaaacattcctcaaagtgtctgttttcttttgaaaagccgtttacttgtctgttcttccctgctttgattttttatcagacaggtttagaatcaggctgaactgtgaagaaatgataataaactgctgatttgatacccttttgggaggaggtgaaaggcatgaacaagacagaactaatcaatgcggttgctgaagcaagcgaattgtctaaaaaagacgctacaaaagcagttgattctgtttttgatacgattttagatgcacttaaaaacggtgataaaatccaactgatcggtttcggtaactttgaggtgcgcgagcgctctgcacgtaaaggacgtaacccgcaaactggtgaagaaatcgaaatccctgcaagcaaggtacctgctttcaaaccaggtaaagctcttaaagacgctgttgcaggaaaataattgtgaatatagatcgtgtatgcatctgatacatacactttgtttcttcacagaaaagccccttgataaaggggcttttcatatttaagcagcctcggtcaccgggcaggactttcgttttgcttttggcgcggcaaatgtgctagaatcgaaattaaatgtattcaatggtggaggacacagacaatgaaagaagttaataaagaacagattgaacaggcggttcgccagattttagaggcgattggagaagacccggaccgggaagggcttttagatacgccgaaacgcgtggcgaaaatgtacgcggaagtattctcgggattaaatgaagacccgaaagaacactttaaaaccgttttcggagaagaccatgaggagcttgttcttgtaaaagatatcgcgtttcattccatgtgtgaacatcaccttgttcctttttacggaaaagcgcatattgcctacattccgcgcggcggcaaagtgacgggcctgagtaaattggcgcgggcggtggaagccgtctcaaaacgcccgcagctgcaggagcgcatcacttcaacgattgcagaaagcatcgtagagaccttagatccccacggcgtcatggttgtcgtcgaggctgagcatatgtgcatgacaatgaggggcgtaagaaagccaggtgcaaaaacagtgacttccgctgtaagaggtatttttaaagatgacgcagcggcgcgttccgaagtgttagaacatattaaacgtgcggattaataatgatagagggtgcagatatgaattcaaagcattcaagtgattttgtcgtcattaaagcggtcgaggacggcgtgaacgtcatcggtttaacgagaggaacggatacgaaatttcaccattccgaaaaactggacaaaggcgaagtgattatcgctcagtttactgagcatacctctgccatcaaagtgagaggcaacgccctcatccagaccgcttacggagaaatgaacagcgaaaaaaaataagccggctgtttcccgcttttgccaaatgcccgcaaacggcgggagaatacagccaatttcttttttttatgctataatgatacctgcgaataataatgacgagtaaatctcatacatattagaataaatgtgaatttggggacaagggtgatatttttgcaagacatctacggaactttagcgaatctaaatacgaaattaaaacaaaagctgtctcatccttatttagcgaaacatatttctgcgcctaaaatcgatgaggataagcttcttctttttcacgctttgtttgaagaggcggacattaagaacaacgacagagaaaattacatagtaactgcgatgcttgtccaaagcgcccttgatacccacgatgaagtgacaacagccagagcgttaaagcgagacgaaaataaaaaccggcagctcaccgtgcttgccggcgactatttcagcggactgtattattcgcttttatctgaaatgaaggatatctatatgattcggacgctcgctacggcaattaaagaaatcaatgagcataaaatccgtctgtacgatcggtctgttaatgacttgaatcaattgatcgaaagcatggcgattgtggaagcggccctgtttcacagagtgtcagaccactttaatcttccgcgctggaaagagctggcgagtgatttttttgtatataagcggctgatgaacggcaatgctatatttctcgatgtcatcggcaatattgtaaagtcagggaaatcaaaggctgacataatggaagatagcttccgaaaggcaaagcaaagcattgaaacgctgctgccgctcaattcaccaatccaaaacctcatgctgaaccggcttaaagcgatcagccaggacaaaacatatcatcagaaagtggaagaagggtaatcaacatgcaggagtcaaaagaacagcgcgtacacggcgtgtttgaaaaaatctataaaaattatgaccaaatgaactctgtcatcagttttcagcagcataaaaaatggcgcgataaaacgatgcagatcatgaatgtaaaagaaggcgcaaaagcgcttgatgtctgctgcggaacggctgactggacgattgccctcgcagaagcggccggaaaaagcggcgaaatcaaaggactggatttcagcaaaaatatgctgagcatcggtgagaaaaaagtgaaagagggcggttacagccaaattgagcttttgcacggaaatgcgatggagcttcctttcgctgatgattcttttgattttgtcaccatcggcttcgggctgcggaacgttcccgactatctgaccgtgctgaaagaaatgcggcgggtcgtcaaaccgggcgggcaggtcgtatgtctggaaacatcccagccggaaatgttcggattcagacaggcgtattttctttattttaaatacatcatgcctttcttcggaaaaatgtttgcgaagagctataaagaatattcttggcttcaagaatcggcaagagaatttcccggtatgaaagaacttgcgcgtctgtttgaagaagcgggcctgacgaatgtcaaataccattcgtttaccggcggagtggccgctacgcatatcggttggaaatgatgaatatacagatgtttgggtgaatgatatgaaatttaaaatggcctattcttttttaaatgacgatattgatgtgattgaaagggagcttgagcaaacggtgcggtcagactatcctttgctgagtgaagccgggcttcacctgctccaggcgggcggcaagcggatccgccctgttttcgtattgctttccggcatgtttggcgactatgacattaataaaataaaatatgttgcggtgacgctggaaatgattcatatggcgtccctcgtgcatgacgacgtcattgatgacgccgagctgcggaggggaaaaccgaccatcaaagccaagtgggacaaccgcatcgctatgtataccggtgattatatgcttgcgggctcacttgagatgatgacgagattggatgagccgaaagcccaccggatcttgtccaaaaccatcgtagaagtatgcctcggagaaattgaacagatcagagataaatacaatatggaacaaaacctcagaacctatttgcgccgcatcaaacggaaaacggctcttctcattgccgtcagctgccagctcggcgccatcgcttcgggagctgatgagaagattcacaaagcattatattggttcggttattacgtgggcatgtcctatcagattattgacgacattcttgatttcacttcaacggaagaggaactgggaaaaccggtcggaggggatctgctgcaaggaaatgtcactctgcccgttttgtacgcgctccgtcagcctgaattgaaaaatcagctgaaattaattaacagtgaaacaacacaggagcagctcgcccccattattgaaaatattaaacgcacagacgcgattgaaaaatcaatggccgtcagtgacaggtacttaaaaaaagcgtttgaaaaactgaatacactgccgagaggacgtgcgcgctcatcattggccgccatcgccaaatatatcggcaaacggaaattttaaattccttttacgaacaagatgtgaacattctccgccctggattgattaattgtcagaaagatgttacgatttcggtgtgcaacttgaaagcctatacataatgatggggtggagaatcttatggaaaaaacttttatcatggtaaaaccggacggcgtacagcgccagctaatcggagagattttatccagatttgagcgtaagggcttacaattggcaggagccaagctaatgcaagtttcagaacagatggctgaaaaccattatgctgaacataaagggaagccgtttttcagcgagcttgtggaattcattacatcaggacccgtatttgcaatggtatgggaaggggaaaatgtagtagagatcacaagacagctgatcggaaaaacgaacccgaaagatgcactgccgggcacgatccgcggtgactacggcatgtttgtcggcaaaaatatcattcacggttcagactccttagaaagcgctgagcgggaaattgacattttcttcaaacaggaagagcttgtaccgtatcaaaaattaatggccgactgggtgtactaagccgtcagcctttctttttctcttgttatgaaaaggtttacatattttaagaaagacagaggctgcgctgccctgtcttttcatttctcacaaatcagcctgcgggctgatttttttattgaaatcgtacaaattagaaagaaaacaggctatactaggacaaaagacagcgagattgggagagaagcaatggagccttacgacatttttatcaccaagtggaaacaaataaccggcgttgatttatctttatacaaagaagcacagatgaaaaggcggctgacgtccctttatgaaaagaaggggttcagggattttcaggaatttgccgccgctttggaaaaggacaagcttttattaaacgaaacattggacagaatgacgatcaatgtttctgaattttaccgaaattataaacggtgggaagttcttgaaacctcaattcttccgttaataaagcataaaaaaccgttaaaaatatggagtgcggcctgttcaacgggagaggagccctatactttggctatgattctcaatcagcagacgggactggccggatttgatatattggcgacagatattgatgaaaaggcgctaagcaaagccaagcggggcatctatcaggaacgctcgctgcaagaggtgccggcttccgtgaaaagccgttatttcactaagcaggctgacaacagttatcaagtaaaacaagagattcagaaaaacatccggtttaagcggcacaacctgcttgccgacagctatgaacaggattttgatctgatcgtctgccgcaacgtctttatttattttactgaaaaagcaaaagaagagctgtatgtgaaaatggcgggcagtctgaaaaagaacggaattctgtttgtcggcagtacagaacaaattttcagcccggaaaaattcggccttgagagcactgatacatttttttatcaaaaaagatagaagacatttaatgaaaacttgtggtatagttttacttaaaagcgttaatgcgatgaagggagaagaaagaaatgagatacttaacagccggagaatcacacggtccgcagctgacgacaattatagaaggtgtgcctgcggggctttatataactgaagaagacattaattttgagcttgccagacgtcaaaaagggcacggccgcggacgccgcatgcagattgaaacggacagagcgaagataacaagcggcgtgcggcatgcccggacactcggttcaccgatcgcgctcgttgtagaaaataaagactggacccactggacaaaaattatgggcgccgcaccgattacagaagaagaagaaagtgaaatgaaacgccagatttcaagaccgagaccggggcacgcagatttgaacggtgctattaagtataatcaccgtgatatgagaaatgtgttagaacgatcttccgcgcgtgagacaacggttcgcgtagctgccggagccgtcgctaaaaagattttagcggagcttggcattaaagtcgccgggcatgtcctgcaaatcggcagcgtaaaagcagagaaaaccgattacacatccattgaggatctcaaacgggtaacggaagaatcaccggtcagatgctacgatgaagaagcaggccgtcaaatgatggcagccattgatgaagcgaaggcaaacggcgactcgatcggcggaatcgttgaagtgatcgtcgaaggtatgccggtcggtgtcggaagctatgtccactatgaccgtaagctggacagcaagctcgctgctgccgttctgtcgattaacgcgtttaaaggcgtagagttcggcatcggttttgaagcggccggcaaaaacggcagtgaagttcatgatgaaatcgtatgggatgaagagaaaggctatacacgcgccacaaacaggctcggaggattagaaggcggtatgacgacgggaatgccgattgtcgtccgcggcgttatgaaaccgatccctactttgtacaagccgctgaaaagcgtcgacattgaaacgaaagaaccgtttacagcgagcattgaacgttcagacagctgcgcggttccggcagcaagtgtagtggctgaagcagcagtggcctgggaaatcgcaaatgcagtcgtcgaacaattcgggcttgaccagatcgaccgcattaaagaaaatgttgaaaacatgaaaaaactatcgagggaattctgatgaaagagcttgaggttcggacagcttcctccgcatatcccgtgtatatcggtgaaggcataaggaaacaggccgctgcccttttgtcttcactgaacaggccgctgacaaagatccttctcatcatcgatgctgaagttgaccggctttacggtgatgagatgttccggcttttaaacgaaacatggcccgtgaaaaaagtgatcgttccaagcggagaagaagcgaagtctctaaaagagtatgaacggattcaaacggaagcgatcgctttccatatggaccgctcctcatgtatgatcgccttcggaggcggcgtgacgggtgatttggccggcttttgcgcagcaacttttatgcgcggaattgatttcattcaaatgccgacgacactgcttgcccatgacagcgcggtcggcggcaaggtggccgtcaaccataaactcggaaagaacttaatcggcgcgttttatcagccgaaagcggtgatttacgatacggagctactgaaaaccctgccggaacaagagctgagatcgggcatggctgaagtgatcaaacacgcgtttatcgccgatcatgcttttttagaaaaacttctcacgtttgacacgttgcaaggactgacaagcgctgagctgaatgaaatgatttataaaggaatttcaatcaaatcggccgtcgtgcgtgaggacgaaaaggaagaggggataagagcttttctgaatttcggccatacgctcggccatgccgttgaggcggaatacggctacggacggattacacatggagatgcggtcgccctcggcatgcagtttgccctttacgtgagtgaacaggttgcgggttgcaagatgaacaggaaagaactcacacaatggctgattgggctcggctacccgggaagcatcagacaagatattgaaacgccggttctctccgcccggatgatgaatgataaaaaaacgcgcggaggcatgacacagttcatcgtgttaaaggaattaggcgaagcgcgggactgcatgctttcaaaagatgagctcgaaaatttgctgaacaaatggcgaatggaggaaacagcatgatgatacgcggcattcgcggagcaacaacggtggaacaagacaccgaacaagaaattttagaaaaaacacagcagctgcttgaaaaaatcattgaacaaaatggatgcaagccggaagacgttgtacagatcctgttatccgccacgcctgatatccattccgtatttccggcaaaagcggtccgccgcctttccgggtggcagtacgtcccggtgacgtgcatgcaggaaatggatgttaccggcgctctgcaaaagtgtatccgtgtcctgatgacggttcagacggatacgcctcaggatgaaatcaagcatgtctatttagaaaaagccgttgtgttaaggccggatttatcattgacaaaaaatactgacatgtaatacgataaacaaagcttagaaatacacaagagtgtgtatagagctggtaagtaagacattgaacagttgagtttagaatagggtagcagagaatgagtttagctgagctgagataaacacgtttttattctgcccaaaagaagcctttcttttgggtttatttcttatacgcaagactcctctcactcttcatctcattctccttaccgtaaggaggagaatcatgaatttacaatcggatgtttctttatttttaaaggacagtctgacacaccgcaccattccaatcgcagagacttttacggtcgacacgatcacacccattcagatggttgaaaaactggacagaaacattacgtatcttttagaaagcaaggatgagtcgtcaagctggtcgagatactcttttatcggccttgatccttttatcaccattaaagagagtcataacacattcactgccgctgatcccaacgggcatacgctgtttgaagccggagaattaaaagccgtgcttgactggatgaatgagagctttcgcattaaaacacccgagcttgatatcccattttcgggaggggcggtcggttatctgagctatgacatgattcctttgattgagccttccgtgccaagccacgcgaaagtaacagatttcgaaaaatgtatgctgtttgtctgccggaaaatcatcgcgtacgaccacgaaacgaaacaagtgcatttcattcaatatgcggcgcttaacggccgggagacggaggaagaaaagcgggccgtttttaaagaaaattgcgcggagcttcgtaagcttatcggtattttgacagaatcgaaagatatgaaagagccgtttttttctaaagaaacgtttgacacgccaagttttgccgctgtgacatccaattatacgaaagaagagtttatggccggcgtcaataaactgaaagaatatataaaagcgggagacatttttcaaggggtgctttcgcaaaagtttgacattccggtatccagacattcatttgagctgtacagggtgctccgcatcatcaatccttcaccctatatgtactatatcaaactgcctgacagagacattgtcgggagttcgcctgaacgtctgatccgcgtgcatgacaggcacctggaaattcatccgattgccggaacgagaagaagaggcaccggaacgaaagaagatgaacgcctgaaaaaagagctgatgaatgacgaaaaagaaaaagctgaacattacatgctcgtcgatcttgcgcgcaatgacatcggcagagttgcggagtacggttccgtagccgttccggaattcacaaaggtcgtttctttttcacatgtgatgcacatcatctctgttgtaaccggccgtttaaagcagggcgtccatcccgttgacgcgctgatgtcggcattcccggcaggaacactcacgggcgctccgaaaatccgcgcgatgcagcttttaaatgaattagaaccgacttccagagaaacctacggcggatgtatcgcttatatcggatttgacgggtcaattgattcgtgtattaccatccgcaccatgagtgtcaaaaacggtacggcgtcggtgcaggcgggtgcgggaatagtcgccgattccgtccctgaagccgaatatgaagaaagctgtaacaaagcgggggcgcttttaaaaacgattcaaattgcagaagacatcttttctggcggggaggagaagacggatgaacaaatttctgcaatcgtgcgttaatggccgtacgctgaaaaccggagaagccgaaaagctgatggagatgatgatgaacggggacatgtcgcagtctgagatcggcgggattttatcggtattagcccaccgaggtgaaacggcggaggagcttgccggatttgtaaaagtgatgcgggcgcgggcacagacatcaggtggcttggcggatgtcgttgatacgtgcggaacaggcggagacgggatttctacgtttaacatatccacggcagcggcgattacagcttctgccgccggagctaaagttgccaagcatggaaatcgctccgtttcgtctaaaagcggcagcgcggatgtgctggaaaagctgggggtttccattcaagccactccagaaagcgttaaacgcagcattgaaatgaaacaaatggggtttttgtttgcgccgctgtttcattcgtcaatgaagcacgtcaccgccgcaagaaaagagcttggcttccgaaccgtatttaatctgctgggcccgctcagcaacccgctgcaggtgaagcggcaggtgatcggcgtctattcattagataaagcgcgcctgatggcaagcgcgttggaacaatttgatgtcagacacgtcatgcttgtgtcggcccgtgacggattagatgaactgtccatcacagcaccgaccgatattattgaactgaaaaacggtgaacgtctggaatattccgtttcacctgaacaattcggttttgcagaaggttcactaaaggatattcaagtgagttcatcggaagaaagcgcgctcctcattcagaatatttttgcaaatgaagctccgtcatccgctctgcatattaccgccttaaatgcgggcgcggccatttatacggcaggtcttgcaaacgatctgaaagaaggaacgaaaaccgccttagaagcgattcaaaacggagatgccaaaaggcagctcgaacgtctgaaacagaaagaggaagaaatgtatgcttgatcaaatcattcagcagaaaaaagaagaaatcaaatccatcgtgctgccggaaacttgtcaaattgaacggagatcctttaaagaagcgctcctgaacccgaaccgttttatcgggctgattgccgaagtgaaaaaagcttcgccgtctaaaggattgattaaagagcattttgttccggaaacgattgcggcggattatgaagcggctaaagccgacgccctttcggttctcacggatacccgtttttttcaggggagaaatcaatttctgacagatgttaaacaaaccgtgtctcttcccgtgctgagaaaagattttattattgattcccttcaggtggaggaatcgttcaggatcggcgccgatgccattttgctgatcggggaagcgctggaaccttcagagcttcatgagctttatctggaagcccgcgagaagggcatggacgttctcgttgaaatccatgatgaaactgtgcttgaacggattttacaagtgtttcagccggacattctcggcataaacaaccgggacttaaaaacgttccgtacttctgtttcgcaaacggaaaaaatagcgcagcttgtaccggacggctgcctgctggtcagcgaaagcggcatcggttctttggctgacctgcaattcgtcaacaagcacggggcgcaggctgtattggtcggagaatccttaatgagagaggattcgcagcaaaaggcgatccgcggactgttcggggagtgatgatatgaaaaagcctgaggtaaagtactgcgggatacgatcgaagcgtgattacgaacttgcggcagcttcaggagcggattatctgggatttatttttgccgcaagcaaacggagagtaacgccggatgaggtccggaaatggaaagaggaggtccggacagacaagaaacatgtcggagtatttgtaaatgaaacgatagaaaacatcgcgcaaatcgcctctgatctggcacttgacgtcatccagcttcacggtgatgaatcgcctgagcatgcccgccgcctccgcccgcttgtgcgctcggaaatatggaaagcgctccatcacggggaagggacgcttcgtcagatggctcaatttgcacctgatgtcgacggctatgtcattgattcttcagtaaaaggaatgagaggcggcacgggaatcgcgttttcatgggctcgtgtccccttgtaccgaaagcaggctcaaaatgcaaacaagcgctgttttattgcgggcggcgttaatcctgaaacgattaccggcttactgagatcgcgtccgtgcggtatagatcttgccagcggaattgaaaaaaacggacaaaaggatcaaacactgatccggcttttagaagaaaggatgaaccactatgtatccatatccaaatgaaatcggaagatacggcgaattcggcggcaaatttgtccctgaaacattgatgcggccccttgaggaaatcgaaacggctttcacagaattaaaaaatgatcccgtttttcatgccgaatataaaaaattattgtttgattactccggaagaccgaccgcattaacgttcgcagacagggtgtcagagtatttgggaggggcgaaaatctatctgaaaagagaagatttaaaccataccggctctcataaaattaacaacgcgttaggccagattctgcttgccaaaaagatgggcaaaacgaaaatcatcgccgaaaccggtgcgggacagcacggtgtggctgccgcgacagccgccgcaaaattcggttttaagtgtacagtttttatgggtgaagaagacgttgcacgccagtcgctgaacgtattccggatgaaactgctcggcgcggaagtggtgccggtcacaagcggcaacggcacgctgaaagatgcgacgaatgaggcgatcaggtattgggtccagcattgtgaagatcatttctaccttatcggttctgtagtggggccgcatccgtatccgtatatcgttcgcgaatttcagaaaatcatcggcgaggaagcgaaagaacagctccgccgggttgaaggaacgctcccggacaaggttgttgcatgtgtcggcggcggaagcaatgcgatgggcatatttcaggcctttttagacgaagatattgagctgatcggcgccgaggcggccggaaaaggaattgatacgccgctgcatgcggcaacgatcgcaaaagggacgctcggggtgattcacggttcaatgacctatttaatacaagatgaatacgggcagattatcgaaccgtattccatttcagcaggccttgattacccggggatcggccctgagcacgcctatctgcataaaagcggccgtgtaacatacgaaagcgtgacagacgatgaagcgattgccgcgttacgtctgctttctgaaacagaaggtattcttccggctattgaatctgcccacgctctggcaaaagcgtttgaaatggcaaaagacatggataaagacaaaatcattctcgtcagtttgtcgggaagaggagataaagacgttcatacgctgatgaatgttttggaaaacggggtggggacacatgtttaatctgcgagattctgaaaaattatttatcccttttattacagctggcgatccgcttcctgacatttctgttgagctggcaatatcattgcagaatgcaggcgcctctgcccttgaaatcggcgttccttacacagatccgcttgcggacggacccgtcatacaacgggcttcaaaacgggctctggaaaacggaatgaatatcgtaaaagccattgaacttggcagcaaaatgaaaaaaaacggcgttcatattccaattatcctctttacgtattataatcctgtgttacaattagaaaaagaatactttttcgctttactgcgggaaaacgacatagacggtctgcttgtacccgaccttccattagaggaaagcgcccttttgcaaatgacatgcaaaaaggagaacatcgcttatatctctctggttgcgccgacaagtgaagaccgtttgaaaataattactgaacaggcctgcggctttgtgtattgtgtatcctctttaggagtgacgggcgtacgcagcgaattcgatccgtctgtatactctttcatacgtaaggtgaaagaattcagctctgttccggtggcggtcggttttggcatttcaaaccgcaaacaggttgacgggatgaatgaaatatctgacggtgtcgttgtcggcagcgcgcttgtcaaaaaagttgaagagcttaaaacaaagcttgtgaatcccggaacaagagctgatgcgcttcttgaatttgaagaatacgcaaagacgttcggacgactgtacagtgtaaaatgaggtgactggatttgcagattaaagaacagctgcggcagctgaaaccgtatcagccgggcaaaccaatagaagaagtgaaaatggaatacgggcttgagaaagtagtgaaactcgcttctaacgaaaatccgttcggctgttcacaggccgctaaagatgcgctgcatcaggagattgagcagcttgcgctgtatcccgacggttacagtgccgctttgagaacacggctcagtgagcatctgcaggtcagtgaatcttcgatcattttcggcaacggctctgatgagcttgtgcagattatctgccgttctttattaaatgatcaggcaaacacgattaccgccgccccgactttcccgcaatacagacacaatgcggtgattgaaggcgctgaggtgcgcgaggtgccgctccgcagtgacggcgctcatgatttggaccggatgctggaagcaattgacggcgggacgaaagtcatatgggtatgcaaccccaataatccgacggggacatatacttctgagcaagagctaattgcctttttaaacagagttcccgagcatatactcgttgtacttgatgaagcgtactacgagtatgttacggcggaagattatccagaaagcattccgcttttaaagcaatatccgaatgttatgatcctccgcaccttctctaaagcgtacggacttgccgcgctgcgcgtcggatacggcattgcggacgaagcactgctccgccagattgaaccggcgagagagccgttcaatacgagcagaatcggtcaggcttcggcactggcagcgcttgatgaccagacatttattcaggaatgcgtcgagaaaaataaagcaggccttaagcagtattatgattttgcagaaactcacggattaacttgttatccttcacaaaccaactttgtgctcattgattttaaccgcccggcggatgaactgttccaagccctgttggaaaaaggatatatcgtccgctcaggacaggcgctcggatttccgacagcgttaaggattacggtcggtacgaaagagcagaatgaggaaattctcacaattttagctgaaatgttataagaggtgatcaggcatcacctctttgctctattaaaatagttgaaaaaggaaatgagtgaaatgaaggatactatattgcttgcggggatcgggctgatcggcggatcgatcgcattggccatcaaaaaggagcatccgcataaacggattatcggtgtggatatttcggaagaacagctcactgccgcgctgaagctcggaattattgacgagcgggccggctcatttacggaaggggcgcagcaagcgtctgttgtcattatcgccacgcctgtcgcccaaacgctgaaaatgctcgatgtgctggccgcatcagacatcacccatgaactcctgattacggatgtgggcagcacgaaacagaaagtcgtcagctacgccgacaaagtgcttccggctcactatcaatttgtcggcggtcatccgatggcgggatctcataaatccggggccgctgccgcgaaagaatttttatttgaaaatgcgttttatattttaacacccggaaaatcgacttctaaagagtcagtaacgcatctgaaggaactcttgaaagcggcaaacgcccactttgtggagatgactcccgaggagcatgacggcgtaacgagcgtcatcagccatttccctcatatcgttgctgcaagcctcgtacatcaggctcatcatgctgaagaagattatccgtttttgaaacgtttcgcagccggcggttttcgggacatcaccaggatcgcctcaagcagcccggcgatgtggagggacatacttcttcataacaaagataaactgcttgaccgcttcaaagaatggaaacgggagattgacacgatcgaatcttatgtagaaaatgaagatgcggacagcctgttcggatattttaaaaaagcgaaagattatcgcgacggtctgccgctccgtcaaaaaggagcgatcccgtccttttatgacctttatgtcgatgttcccgatcatccgggggtcatttcggaaattacggcgatattggcagaagaaaaaatcagtatcaccaacatccgcattatcgaaacaagagaagatattaacggaattctcagaatcagtttccagactgatgatgaccggaagcgcgcggaaacctgcattcaatcccgcgccaaatatgacacattttacgctgactgaggtggaaaacattgaaaagagaaaaagtgacgtctttaaacggtgaaattcatattccgggggataagtccatctcccaccgttctgttatgttcggagcgcttgcggaaggaacgacaacggtaaaaaactttttgcccggagccgattgtctgagcaccattgcctgcttcagaaaaatgggtgtctccattgaacaaaacggaagtgatgtaacgatatacgggaagggcattgacgcactttgtgagcctgacagccttcttgatgtcggaaattccggcacgaccatccgcctgatgctcggcattttagccggacgcccatttcacagtacggtagcgggcgacgaaagtattgcaaagcgcccgatgaagagggtgacggagcctttaaaacagatgggagccgcgattgacggaagagcggacggaggatttacgcctttatccgtaagaggcggacaattgaaaggcattgattacgtctcccctgttgcaagcgcgcagatcaaatccgccgtgctgcttgccggattgcaggctgaagggacgacgaccgtcactgagcctcataaatcaagagaccatacggaacggatgctgaacgcttttggcgccgagcttgcggaaacggagacgagcgcttccgtaacgggcggtcagaagcttcagggggctgatattttcgtgcccggcgatatttcttcagcagcctttttccttgcggcaggcgctgtcgttcccggaagccggattgtgctgaaaaacgtcggcctgaacccgacacgcacaggaatgattgatgtcttaaagcaaatgggagcttcacttgaagtgattccttcaggagcggacagcgcggagccttacggagacctggttattgaaacttcagctctgaaagcggcagaaatcggcggagaaatcattccccgtttaattgacgagatcccgattatcgcccttttggcaacgcaggctgaaggcacaactgtcattaaagacgctgcggagctgaaggtgaaggaaacgaaccggatcgacaccgtcgtatcagagctccggaaaatcggcgcagacatcgaaccgactgaagacggcatgaaaatacacggcaaaaaaacgcttgcgggcggagccgatgtgtcaagccacggtgaccaccgcatcggcatgatgctcggtatcgcttcatgcctgacagaagagccgattgacatccgtgatactgaggcgatccatgtctcatatccgacattttttgagcatttagatcaattagccaaaaaagcctgaagagattggaactgaccccataagatgagacaaacaaaaaacaccttcaagtttgaaaacggaccgttgttatccgaaataaaacttggaggtgtttttctatggggacaagagtgagttatccggttgaagtcaaacagaaggctgtaggaatgagattggcgggcgtgcctatgaaagagatcatgcaggaattgaatatcaaaaataagactcaggttcagacatgggttagatggtataaggctggtgatacacatcgattcgaacagcctgttggaaagcaatacacttacggaaaaggtccggagtattcttccgatttagagaaactgcaggcagagattcgttacctgagacaacagaatgaagtgttaaaaaagtacaacgaattggaaaggaagctgatagggaaacgacaatcaaactggtagaagaattgcgcaagacgatgacggtacaggacatctgtgtccatttagatatttcacgcacttcatattatagatggagaaagaatctgactaagagtaatcctaagatacgactggagaaacaaatcggcacgttgtgccgagaacacaagtatcgatatggatatcgaaaaatcacagccatactaaaaaagagaataagtattaatcataaatctgttcaacgtattatgcagaaaaatcaatggcagtgtcgggttaagatgaaaaagcgtaaaaaaagtgggcattcatattctgtggtcgataatatattggatcggaactttcagtctgatcgccctcttgaaaaactggtaacggacatcacatatttgccttatggacagaaacaattgtacctttccagtatattggatttatacaatggagaagtgattgcttttacgattggagataagcaggacacagactttgtcttagacacacttgatcagctgccaacacttcctgaaaactgcgtgttacatagtgaccaaggttctgtttatacatcttatgagtatcagaaagctgttaaaacaaaaggcattaccatgagcatgtcccgcaaagggacgcccgctgataatgcctccatcgatcgtttcattcctcactaaagtctgaaacgttctatcttaacagcattgatcgaactacgaccgccatcgtagaacgcactgccatagaatacattcattattataacaatattcgtattcaaacgaaactaaacagccaatcgccgatacaatatcggcaattggctgtatgaaggtgttttgatccctgtctcaaaaacggggggcagtccccattcttcgggcttttttcttcatgtgtcataaaactttgggctttgacatagcttgtcttaaacagaaaataacagaaagggggaatgcgttttcgttacagaaacagccggaacaaattgcgctgtttgcgtataaagatgccgtccccttttttgccgttttcctgttaaccattttctgataaactataatgccgggtgaagcatcttatttgcgggcaggccctgtctgaattatgataagaataacccgaataaaaacccttttcattggttgatgaggtataggaaaagaaaggaccggtctgatttgaatacattgatccaagaagccataaaattagttgaagcaggtgaaaccgaaaagggactcaaagcgctttcaaaagctgaaacgcagcttcatgatgaagacaaagccattgcagcccagctctactatgaatggggaaacgccgaaaaagcgttagcgctgatcagtgatctgcatgacctttatccggatgagtctgagctgacgaatttttacgccgaattgttaatagatattgatgaagaagaaaaagctcttgaggtgctggagacaatttctccggaagacccgtcttacgcggaaagccttcttttaatggctgatctgtatcagatgcagggcttatttgaagtaagtgagcaaaagctgttacaggcgaaagcgatgttacaagatgaacctgttattgatttcgctctgggggaattatacttcactcagggatcatacgcaaaagccgttccttactatgaagagacggcaaaagaacggcacgaaatcggcggcgtaaatgttcatcagaggctggctgagtcattgagcgcggcgggtgaatttgaggaagcgatttcatggtatgaaaaagcggcggcagaacatacagaaccgaatacgattttcgggtacgggttcacagcctatcaggcgggaatggtcaaaacagccatcaagcagctgtctgatttaaaagggcttgatccttcctattcatcgctttatatgccgcttgcaaaaagctacgaggcagaaggcatgtatgaagatgcattaaaaaccgctaaagaaggtattgcttacgatgaatacaataaagagctttttctctatgcggcgaaaatggcgttaaagctcggcaacgaagaggaaggcaaaaagcttcttcaggaagcgctggcgctcgatccgggttacgtggaagcgctccatacgcttttagccgtctatcataaagaagaaagctttgaagagattattgatctgattcaggaagtccgcggctacggagaagaagatccgaaatacaattggtatttggcgggtgcttatacaggccttgagcaatacgctgaagcgaaaaaaagcttcgaagctgcgtatctccattatcaggatgatcgggatttcttatatgaatacgctcacttcttattggaagagggtctccagaaagaagcgctgccgcttttaaaacaagtgctttcaatggatggaacaaacgaagagcttgaagaaacaatcttacggatagaggatgaatttttaagataagcaggattttggaccatgcttgctgaatgtataagtgatgtcagattatacgatcgatagaggagggaattacatgcagacccctgtttctgtcaatgaaaaaaaggattttatccgttggtttttaaatcattatcagcttaaacgccgggagtgcgtctggattttaaattatttaatgagtcatgattcattaatggaaaaagtccattttgtagaacaagccgaattttgcccgcgaggcattatcatgtctactcattgcgttgatgaggtgccgtttaggttttacaaagaaaatgtcatgactacggacgcggaaaaatcttttcacgacatccggttaaataaacagcaggatttatttatccagctgaatttccgttcggcctacagctcaccggaatatgccgctgttcttgaatcaaatccgcatctgccgaaagacctgtttgaaaataaacaggatcaggggatggccgaaaaaatattagaacatgccatctccactttccggcgggaaaagctgcttaaagatatcgacgaggcgctggaccgccacgacaaagaaacatttgaaaagctttcccgccaattgaatcagctcacataaatgacagccttgcagaatatgcaaggcttgttgcgtaaagaggaggaacgagacatgagatggagggccgctgatgccgacgtctatttacaatctgcggattacattgataccgccgtcattccgttaatttccataacatcttcaggaggcttaaaagaggccgttgaacagggggaaagcacccaattgctttctgaagagcttgagcgccaattgaagggacgggtatatttattcccctcttatacatatgttgatatagaccaatcacaaatcgccctgcttcaaaaactcaaagacgaggtgatgaccaactttcggcacgtcttgttcctgacggcagacgaaaaatggaaggattttgaaatagggtctgatgtcatatacatacctgccgttccgtttgaacatatgaaagactctttaaagagaaaaattgcggatgacaagtgcggagaaattttgaacgttttgttacagaagtggaacaattcttaaaaacaccaggcatcccgcaaaacacccgttttgcctctgttgaccttgctgaaagattcatatattatgagggtgtcaaatctcagaattattttctattttagttaatttttggtcaatctttagggggggaagagatgggcggaaaacaagatatatcaagaagacaatttttaaactatgcgctcaccggcgtggggggatttatggccgccagtgcgcttatgcccatggtccgttttgcgctggacccggtattaaaaccgacgggagatcaaaaaatggtgcaggttgtcagtgtggatgagctgacgaaggagccgaagcggtttgactttaaaattcatcaagtcgacgcctggtacgaatcggaagaatccaggtcagcctgggtttacaagcatggggatgaaattatagcgctttctccgatctgtaagcatttgggctgcaccgtaaactggaacaatgatcctaaaaatccgaacaagttcttttgtccctgccattacgggctgtatgaaaaagacggcacgaacgttccgggcacgccgccgctcgcgcctcttgaccgttatgagcaaaaagtaaaggacggctttttgtatcttggaaaagcaaagcctaggggggaagggtgacatgctgaacaaaatttatgactgggtggatgaacgtctcgatattacgccgatgtggcgggatatcgccgaccatgaagtgccggaacatgtaaatcccgctcaccatttctcggcttttgtctattgtttcggcggtttgacgttttttgtaaccgttatccaagtgttgtccgggatgtttttaacgatgtattatgtgccggatataaaaaacgcgtgggaatctgtgtattatttgcagaatgaagtcgctttcgggcagattgtaaggggtatgcaccattggggtgcaagtttagtcattgtgatgatgtttttacatacgctgcgggttttctttcagggagcttataaaaagcctcgggaattgaactggatcgtcggtgttctgatcttttttgtgatgctcggtctcggttttacagggtatctgcttccatgggatatgaaggcgctgtttgcgacaaaggtaggtcttcagattgcggaggcgacgccattgatcggagcgcaggtgaaaactcttcttgccggccaccacgatattgtcggcgcccaaacgctgacgagattttttgcgattcacgtattttttctccctgccgctttgtttgcgctcatgggcgcccactttgtcatgatccgcaagcagggaatttcaggaccgctttaatacaaatctgatataaaagggaggggacgacatgcaccgggggaaaggaatgaagtttgtaggagattcaaggataccggctgaaaaaaaaccgaatataccgaaagactattcagagtatcctggaaagacagaggcgttttggccgaacttcctgctgaaagaatggatggtcggggccgttttcctcgtcggatttctcgttttaacgattgtgcacgagccgcctttggaacgggtggcggacccgacggatacagggtatattccgctgcctgattggtattttctatttttataccagctattaaaatatgaatatgccgcagggagctacaccgttatcggcgcgatgattataccgggtcttgccttcgggtcgctgcttttggctccgtttctcgacagggggtctgaaagaaggccgtggaagcgtccggttgcggtcggcatgatgcttttggcgctttgcgctacggtctttttaacgtggcagtcagtcgcgacgcatgactgggcgaaggcggaggagcaagggaaaatcaaaaaagaagccgccattgatactgaatcagacggttataaggtatttaaagaacaaggctgtatttcctgtcacggggataatcttcaaggcggaagcgccggtccgtccctggtcgataacgggctgagcccggaagaaattaaaaagatcgccgtcaaagggaaagggcagatgccagccggtatttttaaagggaatgacaaacagcttgatcagctggcgaagttcatttctgaaacgacagcaaaataacgattgtgaagtagacaatagcaggatatacttttatgaaaagagctgaccggatgtcagctttttttgcatgatacatactttttacggactgagagttgatggtatgaggtggatttcttatcttttagggttgcgcggcatgcttctgcttgttcttgccgttaattttatcggtacggtgtacggctattattggtatgtgcctcagcttgcggacacgccgttccgatttctgatatttgtacctgacagcccgacggcgacgtttttcttcctgttcgtgcttctggcatttcttatgggaagaaacgcgccgctgtttgaagcgctggctcttgtaacccttgtaaaatacgggctgtgggcggtcggaatgaatgtctttgtgctggtcaaaatggggcagatgccttgggaagggtacatgctgattgcttcacattttgccatggccgttcaaggcgttttatacagcccgtattttcggttccggttaaggcatcttgccgttgctgctgtttggacgcttcataatgatgtcattgattatcttttcggcatgatgccccgctactcaatgctcaatgactatatgcaagagatcggctatgctacattctggctgagcatattttcactcggccttgcatactatttggtgatttctaaaagacggataaagcttgacttacactgatagaatcttggtctaaccttgtcccgctcctcatattctgtaaagagaaggagtgggagggacctctatgaaacgaaagctgacgatctgtcttttacttgctcttatgtgtttcatcacaactgccaaagctgaagatgagggcggtctcaaggaactgaacgacctttcggataccgttttccaaatgacgcggcattcgcagtatgatgaggctctgcaagtgcttggctactttaagaaaaaaatgacacacgtaaactcactgagcggcgccgaagtcaggcaggtgactctgggtttcaatgatttagtgcgcgttctgaaacaggcagacgcctcagataccgaaaaaatccgggcagccgcccagttcaggttggtaatggatgcgatggaagaccactccgatccgctgtggggttcgcttgaaagaccgattatggcgacattcagcgccttaaaagaagatgtcagcggaaacggaagtgaaaatttcaatgaaaagtggaatgaatttatatcattatatgatttaatttatcccagcctgacaatggatgtgtcggccggccagcttgatacggtggcgaaacatatcgaggtgattgagcaggacgggtttcagcagatgacaaaaggaacaaagcttgagcgtctgacgctcctgcagcaggatttaaagcgggtttttgacaaggtggagcgggatgatgctgacccttcgctgctctgggtcattctgacaacaggcggtatcattattactgcgctgacatatgtcggataccgaaaatacagagcggaaaaaaagaaagagaaaaagcgtgagtatcctaagtctaaataaacacaaattgctgtaaaggagctaagccagtgaaaaaactcatccagcaattggcttcaaaacacctcccgcagccgatcagaggcagaaaaggggcgactgacgaaggaccgcgaaacctcgcgcgtgacttccagaatcctgacatgctcgttccgccttcaacggatgcgggaacggttcaaaacttgaaattctcattttctgatacgcatatgaggcttgaagacggcggatggtccagagaggtgacggtcagggaactgccggtatccaaaaacatcgcggcggtgaacatgagactgaagccgggagctgtgcgggagcttcattggcataaagaagccgaatggggatatgtgattaacggaggagtccgtttaactgcggtcgatcaaaatggaaggaattttattgacaacgtaagtgaaggggatctgtggtattttccttccggcattcctcattccattcaaggattagagcagggcagtgagtttttgctcgtctttgatgacggctctttttcagaaaacagcaccttttcagtaacggactggtttgcccataccccgcgcagcgtgctggaggcgaacttcggtgttcccggatatgacttggcctacattcacaagaaagagcgttacatgttccagctggaaccgcctcccccgattgaaaaggcagcagtttcttccccggaaggcaccgttttggagcagttcagctacaagctttcccggcaggagccccttgttaccagcgggggaagagtaaagattgtcgattcaaaaacgtttaaggtgtcaaaaacgattgccgcagctctcgtggaagtcgaacccggaggcatgagagaattgcattggcatccgaatacggacgagtggcagtattatctttcaggagaagcgaaaatgacggtgtttgcggcggagggaagagcgcggacatttaactatcaagcgggtgacgtaggatatgttccttttgcaatgggacattatgttcagaataccggtgacaccgtgcttcgctttctggaaatcttcaaaagcgaccgttttgaagatgtctctttaaaccaatggctggcactgacgccgcagcgcttcgtcgagcagacgctcaatgtcagtccggcattcgcccgccgattgaaaaagaaaaaatcaccggttgtcaaatggaaacacaaacagtaaaggcggcaaaagccgcctttttattatcgtctgatcggatttttattttcatcaagcgtaaatccttcgccgagcacatcatggacgtcgcttactgcaacaaaggcgtgcgggtcaacggaagtgatgacgcttttcaaaagcacaatttcgtttttcggaacgacgcagtaaagaacgtccctgtcttcttttgtatatgatccctgtccttttaaaacagtgacgccgcgctccatctcttcaatgattttttgctggatcaaatcgtttttcgaagaaataatcgttgccccttttgccgcatagccgccttcctggataaaatcaatcaatctcgcagcgacaaaaacggctacaagcgtgtacatcgcttccttgtaagaaagatacgtaaacaaagaaagcagaatgacacaggcgtcaaaggcaaacatcgtccggcccatcggaattccgaaaaatttgttgatcagcctggcgatgatatcgaccccgcccgtcgtgccgccgtatttaaaaataatgccgagacccgcgccgataaatacaccggcgaataaggcggccagcgctaaatcatgcgacagcggcatatgaatttcgtaacgctgaaaaacactcagaaaaacagaaagagagacggtgccgatcagggtatagacaaacatcgtccggccgagcatacgccagccgatgaaaaagataggaatgttcaataccaggttggaaatagaagggctgatgtggaataacgcatataaaagcagcgtaatgccggtaaatccgccttccgccaaattgttctgcatattaaagtgaaccagtccgaatgaaaaaacagcggcgccgattaaaataaagcaaatgtttttgattctgatttctccaagcattgcatcaaaccccttttccttccataagattgcgtaaatattatagtggatacaaaagaaaacagcaaactgccgtttttaacatttgtcaaatgtacttgaattagctaacatggaagagatgacaggaggtattcgcacagtgagtgacaaaacgatgaaagacttacaagctgaggtcgatgaatatatcggccaattcaaagaaggctatttcagcccgcttgccatgatggcccgtctcacggaagaactgggcgaacttgcaagagaagtcaaccattattatggggaaaagccgaagaaaacgacggaaaatgagaaaagcatggaagaggaaatgggcgatgtgctgttcgtcctgatctgcctcgccaactcccttgatatttcattggaggaagctcataaccgcgtcatgcataaatttaatacacgtgataaagaccgctggactagaaaagaagaaggaaagtaggagaaaccatgtcaaatgaaaccattaaagtcgtcattgcaggaccgagaggcagaatgggccaggaggccgtaaaacttgccgtccgcacgcctcattttgagcttgtcggcgccattgaccatacatacgatcagcaaacattgcgggaagtgatgtcagctgattcagacgctcttatttatacggatatccgcgcatgtttccaagaaacaaaaccggatgtgctgatcgatttgacaacgcctgaaatcggcaaaaaacatacgaaagccgctcttgaacacggcgtccgccccgttgtgggaacgaccggattttctgaagcggatttagaggagcttcaagccttgactgaagaaaaaggaatcggcgccatcatcgctccgaactttgcattgggcgcggtgctgatgatgaagttctcacaaatggccgccaactattttgaagatgtagaaatcattgagcttcatcatgatcaaaagctggatgccccgagcggaacggcgctgaaaacagcggaaatgatctcaagcgtccgtacagaaaagcagcagggccatcctgatgaaaaagaaattctgccgggcgcccgcggtgctgaattaaacggcatccgccttcacagcgtgcgtctgccgggccttatcgcccaccaggaagtcatgttcggcatggacggccagacgctgaaactgcgccatgactcctataaccgggcttcctttatgtcaggagtgaagctgtcagttgagcaagtgatgaaaatcgaccagcttgtatacggactcgaaaatattatcgactgaatcggcaagggggagaacatcaaatgaaaatcgctttgattgctcacgataagaaaaagcaggatatggttcagtttacgaccgcatataaagatatactgagccatcatgagttatacgcgacaggtacgacaggcctgaaaatccaggaagcgaccggattgtccgttgaacgttttcaatccggcccgctcggcggagatcagcaaatcggcgcattgattgcggcaaatgccctggatcttgtcatttttctgcgcgatccgttaactgcgcagcctcacgaaccggatgtctcggcgctgatccggctgtgtgacgtatacgcgatcccgctcgccacaaatatgggaacagcggaaatcctcgtccggacgctggacggcggggcatttgatttccgcaatcttgtgcgcggaggagagccgaatgtctgaacacgttgatattctggcgttcggcgcccatagtgatgatgtcgagatcggtatgggcggcacgatcgcaaaatttacggctcaaggaaaaaccgcggtgatatgcgatttgaccgaggccgaactatcatccaacggaacggtagggattagaaaagaagaagcggcaaaggcggcacggattctcggcgtaaaagagagaatccagcttacgcttcccgaccgcgggcttttgaaaagtgaggacggtatccgccggattgtcagtgtcatcagagcctgccggccgaaaaccgttttcatgccttatccgaaagaccgccatcctgaccacggcaatgcggcggctttggtcgaagaagcggtgttctcggcgggaattcataaatacagagatcaccaggaactgccggctcataaggctcagcgcgtatactattatatgatcaacgggtttcaccgtccggactttgtaatcgacataacggaaaccatcgatctgaaaaaagaaagcctgcacgcctatcaaagccagtttattcctacggcgcagtcagtgaacacaccgctgaccaacggttatatcgaaatggtggaagcgcgggaaagactgtatggcaaagaagcagggacggggtatgccgaaggcttcttttcaaaacagcttcccgttttgaatgatgatgtttttgggggcggacaatgagaccattaaaaatagggattacatgctacccgagtgtcggaggctcgggtattattgcgacggaactcggcaagctgcttgcggaaaaagggcaccaggttcatttcatcacatcaagcatcccgttcagattaaatacatatcatccgaatattcattttcatgaggtggaagtcaaccaatacgcggtatttaaatatccgccttatgaccttacgctggcgagcaaaatcgccgaggttgccgcgcgggaaaatcttgatatcattcacgcgcactatgcgctgcctcatgcggtatgcgcttatcttgccaaacagatgctcaagcgcgacatcggcatcgtgacgacgcttcacggtacggacatcaccgttttaggatatgatccgtcattaaaagatttaatccgttttgccatcgaagcgtccgacagagtgacggcggtatcaaccgcgcttgccggagaaacatatgacttaatcaagccggataaaaaaattgagaccatctacaactttattgatgaacgtgtttatcttaagaaaaatacagagagtataaaagagaaacatggcattttgccggatgaaaaggtcgtcatccatgtttcgaacttcagaaaagtaaaacgtgttaaagatgtcatccgcgttttccgtaatatcgcagccaaaacaaaggcgaagctcctgcttgtcggcgacggaccggaaaagtgcgtcgcttggcagcttgtcgaaaaatacggactgcaagatcaagtgctgctcctcggaaatcaggacagggtggaagagctgtattccatcagtgaccttaagctccttctttctgaaaaagaaagtttcggactcgtcctccttgaagcgatggcctgcggcgtgccgtgcatcggaacaaatatcggcggaatcccggaagtgattaaagatcaagtaagcggttttctggtggaagtcggcgatattcaggcggcatctgaaaaagcgcttgccgttttagaagataaacagctcagcaaacgattgactgatcatgcgctgaaaatggtggagaccgccttttcttcgcaaagaatcgtcagtcagtatgaacggatttatgacgaattggcaggaccggagtgatcttatggaacaggaatttgtcaaagccctccccatccttcatcacctgatgaaggcgggccatcaggcgtactttgtcgggggagccgtcagagacagctatatgaaacgaaaaataggtgatgtggacatcgcaaccagcgcttcgccgaatgaggtggagcgtctctttaagcggactgtcgatgtaggaaaagagcacggcaccgtcatcgtcttgtgggaagatgaaacctatgaagtcaccacttttcgtgccgaatcagaatataaggactaccggcgccctgaagctgtgcggttcattacttctttatcagaagacttaaagcggagagacttaacgattaatgcgatggcgatgtctgccgaaggagagctgcttgattatttcggaggcgcacatgatatcggacaaaagctgatccgtacggtgggtaatcctgaagaccgttttcgggaagacgctctgcggatgatgagagccgtccgctttatgagtcagctcggctttctgttagaaaaagaaacaagagaggccgttataaaagaccgggagcttttggcacatgtatcagtagaacgaaagaccgtcgagtttgaaaagctgctgcagggcgctttctcacaggatgcaattcaaacgatggtgcagacaggtctgatacaagagctgcccggcctttccggttatgagcagcaaatgctggaagcgagcggctttccgttttcttctttagatgcacgcgaagaacgctgggcagcgctgttattgtttctcggtctttgtccgaaaagcgccgaggcgtttttaaaacaatggaaactgccgggaaaagtcataaaaaaagcggtgcagatcataagcgtttatccggcgcagctggaagcggaagcgatgtaccgggcgggagaggcgctgttatcagccgttaaaatcgggatgctgaaaaagcataagacgattgatgaacaaaagctgaaagaggttcagagcctgtatgagaagctgccgatcaaaagccttcgagacctcgacatttcaggcgctgatctgatggagctcagaaaccgccgcgcgggtaaatgggtggccgaagaacttcgccggattgaagaagcggtattggcagggaagctccctaaccgaaaacatgacataaaggagtggctcgcatcatgggatcaacattaagaacccaattaattgatttattttctgaggcgggtgacggctttatctccgggcagaaaataagtgacgcgctcggctgctcgagaaccgccgtttggaaacatatagaggaactccgcaaagagggctatgaggttgaggcggtcagacgaaaagggtacaggctcattaaaaaaccggggaaactcagtgaatccgaaatccgtttcgggctgaaaacagaggttttgggcaaacagcttcattaccgggacgtcctgccgtccacccaaaaaaccgctcatgaacttgccaatgacggcgcgccggaagggacgctcgtagtcgccgataaacaaacggaaggcagaggaagaatggccagagtatggcattcacaggagggaaacgggatttggatgagcctcattctgagacccgacgttcctttgcaaaaaacgccgcagctcaccctgttatccgccgttgcggtcgtacaggccatcgaggcttttacaggtgtacagcccgccattaaatggccgaatgatttaatgattcacggcaaaaaagccgtcgggattttaactgagctgcaggcggaagaagaccgtgtccgttcggttattctcgggatcggcatcaacgtgaaccagcaggaagccgattttcccggagagcttcaggacattgcgacaagcctcagcatggaagctggcgaaaaaattgacagagcgggtctgatacaagagattctgctgacttttgaaaaacgctatcaggattatttgaaccacggctttacaccgatcaagctgctatgggaaagctatgcggtcggactggggaacgagctcagagcgagaacgctgcaagggacgttttacgggaaatcgctcggcattgatgatgagggagttcttctcttggaaacgaaagacggcataaagaagatctattctgccgatattgagctcaattaatcttagttggtacaagcctcgtgaatttggtatacttcctatgggcagtatcataatgaactgcacctgatcagcagaacagagattacgaaaagtctgccttgatccaaaaaaggactgggacagagggatgacattcgccgaacgttaaacaagtgggaatccttcttattttacagaaggcttttttgcttgcgaagaattggcggctcatctcctcaccgtttagaggaggagaaacagaatgaaaacaaaactggatttcatgaaaatgaaggaaaacggagagccgatcgtgatgctgaccgcttacgattatccgcaggcaaagcttgcggaacaggcgggagtcgacatgattttagtcggggattcgctcggaatggtcgtgctcggactcgattcaacagtcggcgtaacggtcagtgacatgattcaccatacaaaagcggtaaaacgcggtgcgaaaaatacgtttatcgtaactgacatgccgtttatgtcttaccatctttcaaaagaggacacattgaaaaacgccgcggccattattcaggaaagcggcgcggacgcgttaaagcttgaaggcggagacggcgtttttgaatccatccgcgcgctgactctcggcggaattcctgtcgtcagccatttaggcctcacaccgcagtctgtcggcgtattaggcggatataaagtgcagggaaaagatgagcaaagcgcgaaaaagctcattgaagacagcatcaaatgcgagcaggcgggagcgatgatgctcgtgcttgaatgcgtgcctgctgaactgactgctaaaataaaagaagaagtatccattcccgtcatcggaatcggagccggttcaaaagcggacggccaagtccttgtctatcatgacgtcgtcggccacggcgtggacagaacaccgaagttcgtgaagcaatacgccaaaatcgacggcaagattgagtcggccctcagcgattacgtccgtgatgtgaaagaacgggttttcccggaagaaaagcattcctttcagataaaccaaactgtgctgcaaggcttgtacggaggaaagtaagcgatgaaacaactgacagaaactcaacagctgaaagaattaattgcacaataccgctcagaaggccggacgatcggattcgtcccgacaatgggttttcttcatgaaggacatctgacgctggttgaaaaagcaagcaaagaaaacgatattgttgtgatgagcatctttgtcaatccgactcaattcggaccgggcgaggattacgaagcatatccgcgagatttaaagcgcgatgcccggcttgcagaacaggctggggcagatgttttgtttacgccgtctccaagtgatatgtataaaggcgagcaaaatgttgccgtgcaagtgaaaaggagaactgacgtgttgtgcggcgcctcccgcgtcggccattttgacggagtggccactgtgctgacgaagtttttcaatctcgttaaaccgacccgcgcctacttcggcctgaaagatgcccagcaggcagcggttgtggacggattaattgaggatttctttatggatatcgaattggttgcagtggacacggtcagagaagaagacggacttgccaaaagctctcgcaacgtctatctgactgagcaggaacgcaaagaagcgccgatgatctataaagcattgcagcaaggcgctgaactgatcagagacggtgaaagaaatccggaaaccgttataaaaaccgtcaccgatatcatcgaaaacacaagcggcgtcattgattatgccgaactgtacgcttatccggagctgactccgcttaaaacattaaacggcaaggtcattctggcctgcgccgtccaattttctaaagccagactgattgataatatcattattgatattgatgaatgggagagatcataatatgtaccgcactatgatggccggaaaactgcaccgcgctaccgtgacggaagccaatttaaactatgtcggcagcattacgattgatgaagatcttttagatgccgtcggaatgctcgctaatgaaaaagttcagattgtgaataataataacggagcgagacttgaaacgtatattattcccggtaagcgggggagcggcgtcatctgtttaaacggagctgccgcccgtctcgtccaagaaggagataaagtcattattatttcttatcaaatgatgtctgatcaggaagcaaaaagccatcagccgaaggtggccgttctggatgatcagaataaaatcgagcagatgctgggccaggagccggcacacacgattttgtaaaagagcccccttcatgggggttttcttttaagatttaggggcaaaagctgtttttccgctccatttctcaacaaaacgtgttacacttttctcgtatgcaagaattgaggtgtccattttaatgaacaaacaacggttcgttgtcatagatgtcgaaacaacaggaaattcgccgaaaaagggcgataaaatcattcaaatcgcagcggttgtcattgaaaatggacaaataactgagcggttttcaaaatatatcaatccgaatcaggccatcccgccgtttattgaacagctgaccggaatttcgtccggaatggttgaaaatgaactgccgtttgaagcggtcgcggaggagatttttcatctgcttgacggcgcgtattttgttgctcacaatattcatttcgacctcggatttgtccggtatgaactgagcgaagcgggctatgagctgccggattgtgaagtgcttgatacggttgagctttcgcgtattgttttcccggggtttgaagggtataagctcggtgagttgtgcgcggagctgaatattgttcatgaccgccctcaccgcgcagacagcgatgcggaggttacgggactggtctttttagacattttacataaactgaaacatttgcctttaccgacattaaagcagcttagaaggctttcacagcattttatcagcgatttgacgctgcttttggattcttttatacatgaaagcaggccggcggaagaaaagagctgcattccatacgcctctttttcaattaaagagcccgatcacattccggtttcccgtccggtgaatgcggccattgaccttgaaaagtggaacgaagaaaaagaacagatcttatccggcatcatcccccgctatgaaaagcggacagggcagctttcgatgatggatgaagtgcttggcgccttccgcaatcgggagcatgcgctgattgaagcggcacccggcatcggaaaaacgatcggttatctcgttccggctgttttatttgccaaagcggagcaaactcccgtgattatcagcacgtactctactcttttgcagcagcagatcatgtctaaagatcttccgcttttggatcgtatgtttccttggccggttaaagccgctattttaaaagggaaatcacattatctgtgcctgcctaagtttgaacatattctgcatgaggaagatgacaactatgatgcggttttgacgaaagcgcagcttctcgtctggctgacggagactgaaacgggcgacgccgctgagctgaatcttccatcaggcggcagattgctgtgggagcgcatggcttacgatgagaattcttttttgaaaaaagggaaggactcggctgccgggttttatgaacgggctaaagaaaaggcgcaggccgcagatctgattatcacaaaccatgctttgctgttttcagatcaaagcagtgaaacgaaaaaactgcctgcaagcggaacgatcatcattgatgaagcgcatcatttcgaacgcgctgccagcgagcacctggggaagagagcttcatacatcggactgcacacaaagctcagccgaatcggaaccttaaaggaacacggactgttaaagcggatgagaaaactgttttatacgtatgaactgccggcggaaagtttttttgacgccgatgagtggatgaagcatattcaatcggaaagcgacgcatttttcagttcagtgcattcttttgtcaaacgaagaaaacctaaagacgatctgaaccgtctcgtttatagtctcaatcataaaagccaggataaagggtttcacatgataacggacggagcggagcggctttgtgcgatgctggatcagctgcttgacatgttttcagtacaggagaaactgttacatcaaaagcttgatcagatgaaaagcggagcggcttttttagcggccgaatatgtaaagtgtatcagggggctgaaagaatatcgcgatacgttcagcaggctgctgtttgaaaatgatgagaaagaagccgtttgggttgaaattgacgcgaagggcgcaaaaaatgccgtcagcatctatgcgcagcctttggagcccggtgaaatgctggcagaccagtttttcgcccgcaaaaaaagcgttgtgctcacatcagcgaccttaatggtggagcattcttttcaatttatgattgaaaggctcggacttgcggatttttatccgcgcaccaaaagcatcccgtctcctttttcttacgatgatcagatgaacgtcatcattccgaaagagatgaaatccgttaaatatgacggagagcgggaagtcattgagcatattgccaagtatgcagaaatcatgtcaaagggaaaacagccgaagatccttgtcctgtttacgtctcatgatatgctgaaaaaagtgtatcaggaactgaaactcagtatggagatatcaggcattcagcttctcgcccaaggtatttcgggcgggagtcccggtaaattaatgaaaacctttaaaacggcaagccgggcgattttgctcgggacaaatcatttctgggaaggcgttgattttccgggggatgaattgtcaaccgtcatgatcgcaagacttcctttcagggcgcctgacaatccgcttcatgccgcaaaatgcgaatttgccaagaagcaggggaaaaatccgtttcagacgatttccctgcctgaggctgtgttaacgttcagacagggggtcgggcgcctgctccgtacggcgggagacaagggaacaatcgttcttttagatcagcgtgtaaagacggcgggatacggacggctgtttcttgaagcgctcccgacttcatcccttttggagctgacggatgccgaactcggggcttatgtcagccaaacggaataaaagccgcataatcgcggctttcgtggtgtgggatgaggaattgtttttatagtaaaagcgggttcatgccgccttgtgattttattatgccgcgggcgcatcccgttatgactaacaaaatttgttcgaccgatggagggtataaaaatggaaagcaaaattgaaattctgtcaacgattaatgtggagcattcagatgatttatataaaatcgtcgatacattaaaccggactttgaaacgggacaatctgatgttcgggcttgcgctcgacgaagaaaatcaaaatgaagcggtcttcaccatttatcgcacataggtgaaaaagatgagaaaaaaagcattaatatttacagccgtatttggtattatttttttagcagttcttttattttcggccagcatttttaaatctgcaatggctcaaaaagaagaaggccacgaaacagctgccgcagccgctaaagaaaaaacggatctgacagatgctgagaaagttgagacctttgtcggcaaacagaaatattatgttgttaccggaacggataaacatggaaaagatatgtatgtatgggttccggccgacaaaaaagcaaaaattctctcaaaaaaagccagtgacggcatttcaagcggcaaggctgccaagatcgttcgggacgaagggcttgtttccaagctgaatggcgttcacccggcgagagaaaacaatgttccgttatgggaagtgacctatatcaacaaaagcgggcagtatagctttagttatgtggactttacaagcggcaagattctcaaaaacatcacaccgtgagacgtattagggggagttcaagttgaaattggcaaaaagagtatccgcattaacaccgtctgcaacacttgcaattactgcaaaagcgaaagagctgaaagcagaaggccatgatgtcatcggcctcggagcaggagaaccggattttaatacgcctcagcacattatagatgccgcggtgcgttccatgaatgaaggccatacgaaatatacgccatcaggcggtctgccggcgctgaaagacagtattgcaaaaaaattcaaaaacgaccaggggattgaatataagccgtcagaaatcattgtctgcaccggagcgaaacacgctctgtatacattatttcaggttattctcgatgaaggggacgaagtgattataccgactccttactgggtcagctaccctgagcaggtgaaactggcaggggggcgtcccgtctatgcagaagggctggaatccaatcagtttaaaatttcaccggagcagctgaagcaggctatcaccgagaaaacaaaagcgctcattatcaattcaccgagcaacccgacaggtgttatgtatacgaaagaagagcttgcggaactcggaaaagtgtgtctggagcatggcattctgatcgtttccgacgagatttatgagaagcttacatacggaggaaaaaaacacgtctcaatcgcacagctttcagataaattgaaagagcagacgattatcattaacggcgtgtcgaaatctcacagcatgacgggctggaggatcggctatgcggcgggttcggagacgattattaaagcgatgacgagccttgcaagccacagcacatcaaatccgacgtccatcgctcaatacggcgccattgcggcctataacggtccggctgagccgctggaagagatgagacaggcatttgagcacagactgaacaccatttacgctcagctcggtgaaattcccggattcacctgtgtcaaacctgaaggggcgttttacttgttccctaacgccaaagcggccgcagaaaactgcggattcaaagatgtcgatgaatacgtcaaggcgcttctggaagaagaaaaagtcgccgtcgtaccgggctcgggcttcggctcaccggacaacgtccgtttatcttacgcaacgtcactcgatcttttagaagaagcggtcgaaagaatccgccgcttcacggaaaaacacagctgattctgaaaaagcggcttttaaagccgcttttcacttgcattgaccccgttagagtagaacgggtataataaagtgatgaaaaaagagattcaggcagattcctgaatgtctttcttgttctggagggaaagagtttgaaaacaacaatcaaccaagtgtataaacacacaggcgaggaagtaacgattggagcttgggtcgctaataaacgctcaagcggtaaaatcgcatttttacagctgagagacggtaccggcttcattcagggagttgtcgtcaaagctgaagtagaagaagacatcttccaaatcgcgaaatcagtgacgcaggaaacgtcactttatgtaaaaggaattgtgaaagaggacgagcgttcaccgcttggctatgagcttgctgttacatccattgaagtcattcacgaagcgactgattatccgattacgcctaaagagcacggtacggaattcttaatggatcacagacatttatggctccgttcgaaacgccagcacgcaattatgaaaatccgcaacgaaatcattcgtgcgacttatgaatttttcaacaaagaaggcttcgtgaaagttgatccgccgattttgacgggaagcgctcccgaaggcacgactgagctgttcgcgacgaaatattttgatgaagacgccttcttgtctcaaagcggccagctgtatatggaagcagctgcaatggcgctcggaaaagtattctctttcggaccgacgttcagagcggaaaaatcgaaaacgaaacgccatctcatcgaattctggatgattgagcctgaaatggcatttgttgaatttgaagaaaaccttgaagttcaggagaattatgttgcatacatcgtacaaagtgtgctggaacattgtaagatcgagctgaacacattaggtagagacacatcgaagcttgaacaaatcaaagcgccattcccgcgcattacgtacgataaagcgatcgaattcctgaaagaaaaaggctttgacgatattgagtggggagatgacttcggtgcgccgcatgaaacagcgatcgcagaaagctatgacaaaccggtgtttatcactcattatccgacgtcattaaaaccgttttatatgcagcctgccaaagatcgtgacgatgtcgtgttatgtgccgacttaatcgctccggaaggctacggggaaatcatcggcggttcagaacgcgttcatgatatggatttattggaagaaagattaaaagaacacggtctggattcagaggcttacaaatggtatgctgaactcagacaatacggttctgttccgcactccggctttggcctcggacttgagcggacagtggcttggatcagcggagcgcctcacgtgcgtgaaacgattccgttcccgagacttctgaaccgtctgtatccgtaatagttatgaaaaacgaagtctcctgcaagggagactttttctaagtaaaggggaaagctcccggagataaccttttacagtaagaggtgtaaggatgaaaaaacagcaatttatagatatgcaggaactcggcatttcaagcattcccaacctgctgttgacacattaccggcagctcgggctgaatgaaaccgaattgatcctgcttttgaagattaaaatgcatttggaaaagggctcttattttccgacgccgtttgaacttcagtcaggcatgtccatctctgctgaagaatgtacaagctgcctgagaatgtttattcaaaaaggttttctgtttattgaagaatgtgaagaccataacggcataaagtttgaaaaatattctctgcagccgttatgggcgaagctgtatgattacatgcagcattcacaaaacgaaacgcaggaaagaacgtcagaaagagaacaaaaaagcctgtataccatctttgaagaagagttcggaagaccgctgtcaccgcttgaatgcgagacgctggccatatggcaggatcaggatcagcatgatgcgattctgattaaacacgccttaaaagaagccgttttatcggggaaactcagttttcgctatattgaccggattttatttgaatggaaaaagaacggcttcaaaacggttgagcaggcgaaggcgcacagccaaaaattccggcgtgttcaaacgaaacaaaatgatccgcaaaaagagtatacgaggcaggtgcctttttacaattggctggaacaataacatgagaaggggagaaacgtgttaaatttaaagcagattgaatattgtcttgaaaaaatcggcgatatgtttccgcacgcagaatgtgaacttgtccattcaaatcctttcgaattggttgtggcagtcgcattatccgcgcaatgtacggatgctctcgtcaacagagtgacaaaaacgctatttcaaaaatataaacggcccgaagattatcttgccgtatcattggaagaactccagcaggatattaaatcaatcggcctgtaccgtaataaagccaaaaatattcaaaagctgagcaaaatgatcatcgaagagtacggcggagaggtgccgaaagaccgggatgagcttgtgaatctgccgggtgtcggacggaaaacggcaaatgtggtcgtgtctgttgctttcggcgtacctgcgattgcagtagacactcatgtggagcgggtctctaaacggctcggtatctgccgctggaaggactctgttttggaagtagagaaaacattaatgaaaaaagtgccgaaagaggattggtctgttacacaccacagattaatatttttcggcaggtatcattgtaaagcgcaatctccccgctgtgcggaatgtcctttgcttctgctatgcagagaagggcagaagcgtgacaaaaaagggctggtgaaacggtgacggcgattcacattctggcaggctatgaaacatacctgcgcagccttacggacttggaaagccttgaggtcaaaacggcgttgcgccgccatccgctgtatatggatttcagcggtcagccaatcgtgcagccatggagggaaaggggcgaatatgtcccgtttctgtttcagatttggaacgaaacgaaagaaacgctgcttcccgtttttcaaacaagaaaatcgagatgtgatcaaaatgacatgctgaagggaattgcctgtctgattgccgcttttcactggacggcaggggagcgggtcacatcactcgattggtctgtgcttgaaacaaagcattttcccgccgaaccgatcaattgggcggagcgaatggcgtttattttaacaaaaccgactcaatatcactcgtttattcagcttgatgaattgatgacggagatgaagaagcaatatcataaatatgaagccatgaacaaatgttaaaaacctccttttctcataaggaggtttttttgtatgaaaaaaatccttcacctggttgaggtgaaggatttcgtccgctaatgagcgggatttgactggatggttgacgaattggactgcccgttgatatttgaagatgagtcttggtttttgtccgtttgaccgttgtcaggtttatttgagccgtctgaaccggaatcggaatcattatcagagccgttatcttgctgtccgttgttatcggtcccgttaccgggctgattctgattgttgttatctgtttgatccttatcggattgatcctgatttttatccgggtcatcagttggtgtttgatccgatccgtcagacgtatctgtctgattgtcatctgtgtttgaatcatcggtttgcgttttgtctttgtctttatcttcatcagacttctgttcatcgtcagtcgctttatctttatccgcatcgtcttcttcatctttcgggactttgaaagaagctgatgccgtatcgctttttccgtcatcgttttccgctgtcacctggaagctgtatgtggagcctggtgtgacatctgagacgacggcttcttttgccgaactgttttgaatgtcactgtagcttccgccgtcaacggattgtttgacattgaatgttgcatcaccgtcataattccagcttaaagttaatgattttttatctttgtcgtatttcacttgcaatcctgtcggtttatcggctttttctttcgtgtacgttttagaaacggcagttggctgcgttcctttcacgaagtactccgtcacttttttatcatccggcgtattcggtccggctaaagcggcaggattcgagcctttctcaactgtttctttgacgacactgtcaggctgcttgaagcttcctttaccgtcatcaacgtaagagatcagcttttggaaaatccgttttgcgacttgctggtctgcagaagacagtgatttcttgcctgctttgttgccagactcaactccggtccaaaccgccgctgtatattgaggggtgtatccgacaaaccatgagtctgggactccgcccggagcaatgttatatttttgaatgtcctctttagtaaagttggtcgtacccgttttaccggcgacttccacgttcggcacctgagccagtttacctgttcctgattcgacagctgatttgagcatatcggtaatcataaacgctgtgtagtcgctcatagcacttttcggtttcggtgttaaatcaagcttagtgccgtcattaaattcaatcgatgtgaccgcgtgcggttcgttgtacgttccgttatttccgaacgcactgtaggcgcctgccatggtcatagtagatacaccgcggttaccctcaccaaatcccccgatagagtaaggttcatatacttgatctttgtttaatcccaatcctaagtcgtttgcgaagtcgacggcattatcttttcctgctgcttggtatgcttttaaagcaggaatattacgtgagtctgcgagggcctctcgcatagatatctgacctctgtatttattgtcccaatcatgaatcggtgtgccgtcagagtacgtataagccgaatcatcaatctgctcatacgtcgaccattttttattttcaatgaccggcccgtaatcaagaattggttttatcgttgaaccgggctgggttttaccttgtgttgcataattgaatcccccggtagttctgttccgtcctgctccgatagcgcggatttctccgtttgtcgtatcaaggagagtgacgccgccctgcatgccttccgaaaagccggctgtatctccgttcatcaattgatcaagataatcttgtgctttcgtatcaagagtcgtgtaaattttcaatccgtcagttgaaatatcgacgtctttcttttcttttgtctcaatttctttcataacttcttcgacaaaagcgctgtatttatttgtgtcctttttatcgtattccttttggctgacgacgccttcatctttcatggacactttctttgctttttggtagtcagaatttgaaatgaatccttgtttttccattaagctgagaacaatgtttcggcgtttttcggaagccttcggatttttaaccgggttatatccggtcgggctttgcggcattccggcaagcgtcgccgcctgttcaaccgtaagcttgctcaagtcttttacgccgaagaattcttcagccgctttaccgacgccgtaggcacgcggtgagaaataaattctgtttaaatacatctctaagatttcatctttagaataatggcgctccagctgcagtgaaagccacacttcctgtgctttccgtttaatcgttttctgatgggtcaaaagcgagtttttcacaacctgctgggtgattgtgcttcctccctctgaaccgaatccatctgtaaagttggcgaccaaggcgcctccgatccggatcgggtctataccgtggtgcttataaaaacgggcgtcttcagttgcgataaatgcttctttcacaacatcgggtatatccttaatcgggacgtaggttcgtttttcaccgcccacttccgcgatttctttgccgtttttatcgtaaatcgttgaagagtaaggcgttttcagcttggcttcgtccaaagacggcgcgccggaaaccaaaacggcaaatgccgccgctccgccgactatgccaaggacaaacagaataaccaaggacagtacaatctttttgaataaaccgcctttacgctgtttcttgccttttttcggtgaagagggcttagtgcttttcgtctgccttgccttacggcgttcttcacggctcgtaaattgatctgacataacatctcaacctttcgtttatcaacctttcgctcagtctactgttcctgcgaaaaataaagctgttcaataatactaatataatcaattctcggtgagtatccaagggaaatcggaaaggaagcatcttctaattcgtctttgcgaatcgattttctgccattgttctcctttctctcccaaaagacaaacagcttgtcggcttcgaggaaataaacctttccgaaagcggatataataacaaaacaaatgccgtcttgtctgaccacctgcttcatatgctcaatctgatgatcatgaaaattctgcaggggaaatgccgttttgttttttgtttcttttgcctcaaaatcaatgtagcgtcctttataaatgccgttgtagtcagttgtggaagactgtttaaaataagcttccttaatgactgcggcacttcttttcggatagtggacgtttacaatctggacgggtgtcggctttttgtgaatgacagcaatttggttagccagataatatttattcgtttcattcaggtcgtcttcgagggtcatgccgcgattactgtatgaatgagaccgtttctggctgttttgggatgaaaccgttttgttcggctgaaaagtttttccattcgggtaccgaatcactttttccatcctccttatcaaactaatagtgacggaagtgaatgaacgtgcataaacgacagaccgtaaccgccattcttcgcctgatcgaaaaagagacgaaaataaaaaatgccgataatatttcccggacgaatgcctataaagcatattatgaccgccatcctgagatcaagtggccgcttttggcatcctttgtgtcccgcaatgcgggctggtcgatgactgatttaagaggcatcctttatcaggagggccttgacagcagtcagaaaaactggtttttcctttcgtatgaaagggcgaattggctgattttttctgatgcctatcctcagcttctggtctaccagtggtcaaaacaaatcggcgaacctcttttccgtcatcttccttatttccgcgtctcggcttttatgcaggaagagtggtttcgcttttggcgtgacggagatacggaacggctcatgtatgctcttattataaatgaacaaaacactatccaagcacctattatacaaaatccttcgtttaaaaagaatgtttttggcacgattcctttttatttaagtgattggtttcactttaatacggtgatattcccttcatttgacggacatttatacggaatttccgtcaaacggttttcaaaaaccgaagagagaattacgctcggaaaacagctggcacgcctactgttcagccccgatcttcacgcttctttttaccgttttcttgataccgttcctcataccggttcacgctttgatatggagaaaatgatcggcatcaaaaaaagaacatcaccgatgctgaggacaacctatcccattgttgcccacccattagacggcgaaagggcggattggtttcaaaaaaggttaagaaaaggggctttcttacaggagaaaatgccgaaacagcttgaactgacggactggtacttccagaaaagacgggagctccatgcgctcttcgcggttaaagagtggctgaagaaatgaaaaagcccgaaaccgttcgctggggtttcgggctgctgatgtgttacgtggaagggcggtttgggccgcctaattttttatcaagcgtatcagtcgtttttgcttcggttttttgctgtttacctgcatttttcggtctcgttttcatacggcacctcctcaactgtatcgtttgcattaacgtgccggttcatacaaagtttgcggcacttttttgtcgaaaggcacgccttttaggataatctctgtttgtttgccgaactgcttctagttttgtcatgtgcagaggagagcggtatgaaaacgagaattatattcgtaagagacgcaagtgataaaagggaggaacatgaatgtctgtttacacgagcaaggctgatattctccgtctgctttctgatatcgaattccggatttctgctgctgaaaagacgcttacccaagcagtcagatcctgtcaggcggaagctgaagaaatcagacaggagaaactttcccgccttgaggaagaggcgcgggagcttcatgtttgtattgatgacctgtttttgactgaccggcgtaaaaaggatttgccgagagcctgccggatcagctgattttatgcaaaaactttggtaccatatgtactgaggtgagtccgtttgcagacacagtcgttattggagctgacagaacaaatgatagaggcggttctggaagccgaaaaaaggtatcaggatggaaaagagtcaggccgttcatatgatttttttgagattattaaacccgatgttgaaaaaagagaccggctttgcgcgctttggacagaagcagcgcttgcgtttattcaggaaaaccgtccgaaatacgttcatcacgcacaaattcaggccgttacagaaaatttcggagagctgatgctccgatcatatgttcatcatattcataaaaaaagatacagggatttaactgaatctgttttatatacgcttcgtatattgagggatgaaattgaaaaagaaggcagctgaaaacggctgccttcttttatataaaggggtcgggtatgttattcatacgccgggttttctgctccacttgcttcgagaaccttcatactgtttcgaaattcggttgcggtgagatggccttgaatatagaggaattttgcaaagtccatcagtttatctgcacaatctgtttcatattttttcacttcagcaaaacgctttcttaagtatgatacgttcataatggtgcatcccctctcatgtatgttgagattatggtaacataacgattcgacttttttctgtttttaaaaaattaagactttcgacagcatttgacaaaaatcagaatcaccgaaagcacataaccacggcggaattcatacatatatagcagaaacttagtgagagacaagggggaatgtcgtatgcaatggagagcagagccatatcaaaatatgtaccagcagccggcgggatatttctaccctcagcagatacagccattacagcagccgtatccgcagcagatacagccattgcagcagccgccatatcatcagcaagggcagtacccgcagcaattttatccgaatcaggaatacggtcatatgcagcagccgtttgctccccctcctcctcaggcagccatgcccggggggcagccggggtttgtgaatccttaccccgttcccagaccgaatcagcagcagtcttcccaattctcaggcatactctcccagtttaaaaaaacgaacggacagtttgactttaataaaatgatagatacaacggggcagatggtaagcgccgtaaatcaggtcggatcgctggtgaaaggcttcaccagtatcttcaaataaaaagcatgaatgatatccatcattcatgcttattttttagggaaaaagagggtaagcgtctgttcattccaggatgtttccatatcttcttcactcaccttatacgggaggacaacggttcttgtcatgcttgaagacacatgggatgaatgagcctgtttatgatcgtagcggattgtaacgtgaaggtagcaccccttcgtttccaccagcatatcaccgtcacggaatgtctcgggaacgctgatatcaaccgcgaggcccctcggctcttctctgacgtcaatcgtcacttgcgcttcagtaaaagccgaattgacaaggtgctgaaaaccctgcatcaattctgcgaagggacctgagtgaaaaaattggtccatcgcatggctgatgatgtcctcattactttgccgatcaagtttatcgttttgtgattgatccatatgaccaccgcctttttacaaacagactatgcgatgttatgccgtatggttaagaattgaaggaaaaaagaaagtatggttaaatagtggagaataaactggtaacggattcacatttaggaaggggagcacaacacattgctgaaaaaattattcggattgggagacagccggaaaaagccggccgaggaagtgattttttctccggctgacggagcggtgatggatttggcttcagtgccggatcccgtattttcacaaaaaatgatgggggacgggatcgccgtcgagcctgcaaacggagacattgtttcaccggttgagggagaagtgattcagctgttccatacaaaacatgctgtcggcatccgcaccctttccggagcggaacttttgatacatgtcggtttggataccgtcaatatgaacggcgaaggctttgaagcgcatgtaaaagaaggagacaaagtgaaaacaggcgatctgcttttaacgtgccggctggatttaataaaagaaaaagcaagcagcaccgtcatccctatggtgattatgaatggcgatgccgcagaacctttgcaatttgcaggcgcaaacgaagcgaaaaaaggacaaacagagctttttacgataaaaatgaagtaggcaggggctgattccctgctttttttcttgtacaggattttcatctagccaggcaaacaaatattcggtaaactgtacctcataaagaggtgtgaacgatgaagaaaaaatcattgagcgaactgatacaggaattaaaaaatcatgaaaatattgtgcattggcatgaagaggaaccgcgggaggcgaaaaccatgccgatgccggagcaagtagatccgaaaattcgggcggctctcgaaaagagggggatcgagcggctctttacacatcaatactccgcttttcagacggttcaaaacggagaaagcattgtggctgtcacaccgacggcctccggaaaaacactgtgctataatcttccggttcttcagtctatcgcggaagatgcctcaagccgcgcgctttatttatttccgactaaggcgctcgcgcaggatcaaaaaagcgagctgaacgaaatcatagacgagacgggcatggacattaaaagctttacctatgacggagatacgtcaccggccatcaggcagaaagtcagaaaagccgggcatattgtgatcacaaaccctgatatgcttcattcagccattcttcctcaccatacaaaatgggtgagtctgtttgaaaacctgaaatatatcgtcattgatgaattacatacgtaccggggcgtattcggcagccatgtggcgaacgtcatccgccgtttaatgagaatctgcgctttttacggaagcaagccgtcatttatctgcacatccgccacaatcgccaatccgagggaattggcggagcagctgacgggaaaatcagtgcgcctgattgacgataacggcgccccggccggaagaaagcactttgctttttacaatcctccgattgtaaataaaccgctgcatattcgaaaaagcgccaccgtggaagtgaacgaacttgccaaaacttttttaaaaaataagatccagacgattgtttttgccagaagccgtgtccgggttgaaattattttaagccacattcaggagatcgtaaaaaaagaaatcggcgcgaagtctgtcagaggttatcgcggcggatatcttccgaaagaaagaagagaaatagagcgggggttaagagacggcagcattctcggcgttgtcagcacaaacgcgctggagctcggcgttgatatcggccagcttcaggtctgcgtgatgacggggtacccgggcagtgtcgcgagcgcatggcagcaggcgggccgggccgggcggcggcagggagaggcgcttatcgtgatggtggcgaactctgatccgattgaccaatatattgtgcgccatcctgattatttctttaaacgctcgcctgaatctgcaaggattaatcccgataatctcattatactggtcgatcacctgaaatgcgccgcatatgagctgcctttcagagccgatgaaacattcggagaaaatgatgcaagagatattctcgagtatttagaagaagaaggggtgcttcacgaaaaccgcgaacgctatcactgggcgagcgaatcttttcccgcctccaacatcagtctccgttcggcgtcacaggaaaacgtggtcatcgttgaccggtcagagacggctgatgtaaaaatcatcggagaaatggaccgcttcagcgcgatgacgcttcttcatgatgaagcgatttatcttcatgaaggggtgcagtatcaggttgaaaagcttgattgggatcataaaaaagcgtacgtgcgaaaggtcgatgtcgaatattatacagatgccaatttagcggtgcagctgaaagtgctggacattgacagaacggacagcagaaagaaaacggccttacatttcggcgatgtaaccgtgaacgctcttccgacaatatttaaaaaaattaaaatgacgacatttgaaaatataggatcagggccgattcatcttccagaagaagaactgcataccagtgctgcctggcttgaattgaaaaagacggattcggagatcggcgaaaaaacgcttgaacagctgcttttaggcattgcccacgtcctgcagcatatcgtgcctgtatacgtcatgtgcgaccgaaatgacgtgcatgtcgtgccgcaaatcaaagccgcacataccggacttccgacaatctttctgtatgatcattatccgggcggaatcggacttgctgatgaagtatataagcgatttgatgaaatcaatgaaggggctgagcgcctgatcagacaatgtccatgtcaagacggatgtccttcctgcatcggctccgaaatagaaggaatagatgcaaagaaagcgatactccggctcttgaattacgtgtaaaagaaaagggggacgaaagatgtccttgaaaaataaattaaagcggatgaaaaaccacctgaatgtgccggaagctgaaaaaaagccggcagcttcacaactttcggtcccggatattcaagtcccatttagagaagaatgggaggcattcggagtgaagcctttcttttttgaggatgaatactgtcttatccgcgaaaccgtctatccgctttcgcaccgccacggacggtacagcttcagtgaacttgatgacgtcatggcattatggaataaaggcggtttgacacatactttatcagcagaaggatacgaaaaaagccagctgttcttctttgatactgaaacgaccggcctcggcggcggggccggcaatatgatctttttgcttggtcatgcaagagtgtatgaagaccgtgtcgcggttaaacagcatctgcttcctaaaccgggaaacgagacggctctttacaaaagctttttaagtgaggttgacattacgtctcttgttacgtataacggaaaagcctttgactggccgcaggtaaaaactaggcatacattgctgcgggacaggcttccgaaacttcctgacttcggtcactttgatcttctgcacggggcgagacggctttggaaacataaattagagcgtgtatcgctttcggcggttgaaaatgaagagcttgcttttaaaagggacgaagacacacctggttatttggcgccgatgctgtattttcaatttttaaaggcggaggaaccggctcttttaaagggagtgctctcgcataatgaacaagatgtgctttccctcatcgctctttacatccatatgtcaaaaaagatttttgcatcttctgatcagacgtcagaacgtcaggaagcatacgccatggcgaaatggtttatcgctcataaagaaaccgatcgggctgtttcacagctggaagcgctgcaaggcaaagcctttgaagattcggatcgggccctttttgacttagcaatgctttataaaaaacaaaaccgcaggcaagacgccgtgcccctttgggagaaactgacgggctctgatctttacatatgcagacaccaatcagcggtagagctggcgatctattttgagcatcacgcaaaagattataaaaaagccctgcaggccgctcagcaggcggcaaacgacggggaaatatcggaaaaagaagccgagaagctccatgtgagaattgcccggcttaagaggaaatattcctcttgaaatattgcccgggaaagcgcaaaagccgagctgtttcgccaaaaatatttttttctgaatccgcatcgattttgttgtagaatggtgccgcatcttgtaaaatagcgttagttatttataggggagagttggtatgtataaaggtgttttttacttgttctttgtcgtggtttttttgattgcgtttgtattttcgaattttaaagacagcttgctgacgcacttttaaattgggtgattgaattagaacatgcaccctcttttcttcataacctaacagtgtaataaaagttaatggagaggggatttagcatgtttcatcatcattgttgcagaccaaacgtgatgccgccgattgtccatccgactcattgctgtgaacaccattgtttttctaacacagttgtgccgcatattcatccgcaacatacaactaacgtaaatcaccacaactttgagcacgttcattactatccgcacactttttcaaatgttgacccgacaactcaccagcattttcagtgcggaagcccttgctgcgatcattagtattgaacgcttaagcaagatcggttaggatatcagcaaatcaaaatggggcccgatggggagccccattttttaagcaggtgatcaattgaaagtattagccgtaacaggatacaagccgtttgaactcgggatttttaaacaggatgaccgggcgcttgtttatataaaaaaggcgatagaaaccagactcagaagctttattgacgaaggcttggaatggattctcatatccggacagctggggactgagctttgggcggcagaaacggcgtacgatctcagagaagagtatccggaattaaaggttgccgttatcacgcctttctacggccaggaggaaaagtggaaggagccgaataaagaaatgtatgaagcggtgcttgctcaggcagattatgaggagagcctgacgcatcggccgtacgaaagtccgctccaattccggcagaaaaacgcgttctttattgaaaagtcagatgcgcttttgcttttatatgatcctgaaatggaaggatcgccgaaatatatgctgcagcaggcagaaaaacgccgtgaaacagacggatatccgatttatttgattacgatggatgatctccgtgccgccgttgaagaagaagatttctttacataacacgtcagagaatatttgacaacgggacgtgtttctgaataaaatataacatgatgattcacgatatgaggtgaaaaagatgcttgctgataaagtaaagctttctgcgaaagacattttggaaaaagaatttaaaacaggcgttagaggttacagacaagaagacgttgacaaatttttagatatgattattaaggattatgaaacctttcatcaagaaattgaagaattgcagcaagaaaatctgcagctgaaaaaacagcttgaagaagcaagcaaaaaacagccggtgcagtccaatacgaccaactttgacattctgaaaaggctgtccaaccttgagaaacatgtattcggcagcaaactttatgacgaatagggcagatgcacttgtcaaatgagacaagttgctttataatgaacaagtgttcttaacgttcgggtaatcgctgcagatctttgaatctgtagaggaaagtccatgctcgcacggtgctgagatgcccgtagtgttcgtgcctagcgaagaaataagctagggcagccttgataggctgacggcaggaaaaaagcctacgtctccggatatggctgagtatccttgaaagtgccacagtgacgaagtctcatcagaaatggtgagagtggaacgcggtaaacccctcgagcgagaaacccaaattttggtaggggaaccttcttgaaggaactgaacagatagaaggacagaatactttctgtagatagatgattgccgcctgagtacgaggtgatgagccgattgcagtacgacggaacaaaacatggcttacagaacgttaaacattattgatatgacaaattagagctctcctttaaaggggagcttttatcttgaatgaaacgaaagcttaaaagagacagggtgatacgatgaagaagtacacactaatagcgacggcgccgatgggaatcgaagcgatcgtcgccaaagaagtgcgtgatttaggttatgaatgcaaagtagacaacggaaaagtcatttttgaaggagatgcgcttgcgatctgccgcgctaacttatggctgcggacggctgaccgcattaaagtacaggtcgccgagtttcaggcgaaaacgtttgatgagctgtttgaaaaaacaaaagcgattgactggcgcgcgtacattccggaaaacgcaaagttccccgttatcggaaaatccgtgaaatcactgcttgccagtgtgcctgactgccagcggatcgtcaaaaaggcgatagcggaaaagctgaaactgcaatcaggaaaacaaaatgaatggattgaagaaacgggccccgagtataaggtggagatttcccttttaaaagataaagccgtgcttacactggattcatcaggaacaggccttcacaaacggggatacagggttgatcagggaggagctccgattaaagagacgctcgctgccgcgttaattcagttaaccaactggacgcctgaccgtccgttcgtcgatccgttctgcggttccggcacgatcgccattgaagccgctttaatcggacaaaacattgctcccggttttaaccgtgattttgtttcagaagactgggaatggatcggaaaagaactgtgggacaaggcgcgtcttgaagtggaagaaaaggcgaactatgatcagccgctgcagatctttgccagtgacgtggatcaccggatggtaaacatcgccaaagaaaacgcagaagaagcgggactcggtgacctgatcgaatgcaagcaaatgcgggtgcaggattttacgacgaaactcgaatacggcgtaatcgtcggaaaccctccgtacggcgaacggctcggcgaaaaaagggaagtcgagcagatgtataaagaaatgggccgggcatttgaatctcttgatacatggtctgtctacatgttgacgtcaaatgaacaatttgaagaggtctacggaagaaaagcaaccaaaaaacggaagctctttaacggttttatcaaaacggattattatcagtactgggctaaagtgcggccgcaacggaaaaagccgcaacaaagagaagacgcctgaaacagcgtcttctccggcatctttacgttttattctgccattaccagcggtgcgcttttgcgttgctccgtaaaataatgttggtctgggacatttcggtgtggccgttcacttgcgatttagagcgtttcggccgcgtccaattgtgatgaaacaattcagaatgctgatctaatcgatctttataactcatgtaaccatcactcccggatagaataattttgtgaagatggatattcgatcgaatatctgttgtagtttgtgcaggtcaggtgcggatcattcagaatggcatgtatagaaagtgaagcatcggcatagaatgatgattatttctatttgagaggtgatctattttatgctgaacagcgagcacttcagtaaaatacaaaaggcgttagacgcaactgctttccggctggaggaagccggagcggagttcggtccttccgccatgacacacgcacaggaagaacttgaaaatgcggtaaaacatacacattcaacagaccatccgttcctatgtacacatatcattaaccggaaatgataatggcaaaaacttggcgaggccaagtttttttgttgtattgaaaagggttaaatgatattatagatggtctgaatgccgaatagttaggggttggagttgggtgacaacatcacgtttgccttttgctttaacaaaagaaaagaatttttacgaagaattgaacaattggattggtgacgtgttttacgatatccttcccgagaaaggctttgaccttcgggatgagcaggtatttatggcgtttcagcttgaacgggcatttaaagagaaaaaagtcatgttcgctgaggcaggagtcggtacggggaaaacgctggtgtatctgctgtttgccatcagctatgccagatatacgggtaaaccggccattatcgcatgtgccgatgaaacgttaattgaacagcttgtcaaaaaagaaggcgacatttccaagctgacagaacatttggatctgcagattgatacacggctgtccaaatcccatgagcagtatctgtgtctgaaaaagcttgagaaaacgatgcagcgttctgatgatgaaaagtggctggatctttatgagtcgctgccttcattcgtacacgaatcacaagcgatgcagcgcttttatccgtacggcgaccgcaaacagtacgctgatttgacgaatgaagagtgggcaggcgtcagctatgattccttccaagattgtttaacttgtgatatgagacatagatgcggtttaacactttcgagagatcattacagaaaatcaacggatctgattgtttgctcccatgatttctacatggagcatgtatggacggaagaatcacgcaaaagggaaggacagctgccgcttttgccggatcacagcgccgtcgtgtttgatgaaggacatctgctggaattcgccgcgcaaaaagcgttaacgtatcgtgtgaagcagtcgacgcttgagctgtttttagagcgtctgcttcaaaatgatatcagagaggaattcgccgaactgattgaagatgcccttgccgcaaacgatgagtttttctatgtgctgtcagaggaatcgaaggaaatcgcaggctctcaccgattggacatccaaaacgaccagcgtgttaagcgtgcggctgacgaactgtgccgtctgctcgataaaatcggcgaggcgctcgtatttgaatcggaaatgtatacgatcgataagtacgagctgtcagttgtagaagaatacgtcgaacaaatggcatattcgctgtcgctgtatcaaaaggatgccatcagctggcttgaaacgcgggatacagactcaacgtttgtcgttatgccgagaacagtagccgaagttttgggagaaaaggtcttttctaaaaagatcccttatattttctcatcggccactctttctgagggcggttcatttgattatatcgctgacagcctaggaatccgtgatcctttatcattcaccgttgaatctccgtacgattacgaggagcaaatgtctgttgcgcttcacggtgacatgacgtctgagcagaaaacagccgaaacgattgaaaccattaagaagaatgaaggacgcaccctcgttcttttcccttcctttgaagacatgaaggaatttaaagaacaggctgccgcgtgggagctgccgtatccgatatactacgaaggtgatgaagagatcagcagtctggtcgaaaaattccagcgtgatgaagaatccgtgctttgttccgtccacttatgggaaggtcttgacattcccggtgactcgctccggaatgtgaccatttgggcattgccatatccgcctcatgatcccgtgtttaccgcaaagcggaacggagcgaaaaaagatccgtttgaggaagttgatctgccgtacatgctcttaagagtccggcagggaatcggccgcctcatccgttctaatcaggacagcggaaccatatccatttatgcgggcggagaaagtgaacgggtcttggccgaagtcaaaaaggttttgcctgttacaccgaaaatcgtataaaaacaacagctgcaggattcttatcctgcggcttttttaaatctgggaagttgactttatcacggcgttccattagcctgtaattgatagtgaaaagggaggggaacggatatggatttacatacatatgaaaaagagttttttgatctgttaaaaagggtgtcccactatgaagaagccattgcgcttatgcactgggacttaagaacgggagccccgaaaaaaggctctgatgaccgggcggaaagcatcggacagctgtcggctgacgtttttcaaatccagacatccgaccggatgaaagagctgatcgacatccttctcgcgcatgcagaggagctctctgaagatacagtgaaagcggcggaacttgcgaaaaaagattatgatcataataaaaaaattcctgaagatgagtataaagaatatgtcattttaacatcgaaagcggaaacggcttgggaggatgcaaaggcggcctctgatttctctatgtttgctccgtaccttgagaagctgattgattttaataagcggtttatttcgtattggggctatgaagatcatccatacaacgcattgctcgatattttcgaaccgggtgttacggtaaaggtgctggatcagctgttttctgaattgaaggaagcgattattccgcttatcaaaaaagtgacggaatccggcaataaaccggacacttcctttataacgaaaacgttttcgaaagaacaacaaagagccctctccttgtatttcttaaaagagttcgggtatgattttgacggcggccgcctggacgagacggtgcatccgtttgcgacgacaatcaaccggggcgatgtgcgggtgacgaccagatatgacgaaaacgatttccgcacggcaattttcggaacgattcatgaatgcgggcatgcgatctacgagcagaatattgacgaagcgttgagcggaacgaacttatctgacggtgcatccatgggaattcatgaatcccaatcattattttatgaaaactttatcgccagaaatcaacatttctggaccgcctattatgaaaaaatggttgaggcttcgcctgatcaatttcaagatgtgaaaagagaggactttgtacgcgccgtaaatgaggcgaaaccgacatttatccgaattgaagccgatgagctgacatatccgcttcatattattatccgttatgaaattgaaaaagcgattttcagcaatgaagtgacagtggaagaactgcctgcattgtggaatcaaaaatatcatgattatttaggcattacgccgccatctgacgcaaaaggcattttgcaggacgtacattgggcgggcggcgatttcggctatttcccttcctatgcgctcggatatatgtatgcggcacagctgaagcataccatgcttgacgatctgcctgaatttgaccaattaatagaacggggcgattttgagccgatcaaacaatggctgacagaaaaggttcatcagcacggaagacgcaaaatgccgcttgacatcataaaagatgcaacgggagaagagctgaacgttcaatatctcattgagtatctcgtcggcaaatattcaaatttatatttataaacgaaacgcccggtatacaccgggtgtttttctaaaaattctaaaaacacgaataatcgaaaacaaattctttgtaaaagttcggaaatattcaaatttcactatgcaaaagaagtgtatcttgttataatttgattaatatcatacgaacactcatataatcgcgtggatatggcacgcaagtttctaccggtcaccgtaaatgtccgactatgagtgagcaatgggacggcttttattcggccgttgcgtgtagatcattcggcattgcttgctctttttttggagagcgggcaatgctttttttatttttttataagcgggggtaatcattgtggaagcattaaaacgaaaaatagcagaagacggaattgttctttctgatcaagtgctgaaagtggattcttttttaaaccatcaaattgatccggttctcatgcagcagatcggccgggaatttgcgcgccgttttgaaaaagacgagataaccaaaatcgtcacaattgaatcttcgggcattgcccctgcggtgatggccggccttgaactcggcgttcccgtcatctttgcgagaaaaaggaagtctctcacattaacggatgatctgctgacggcatccgtctattcatttacgaaaaaaacagaaagtcagattgctgtctccggaaatcatctgtcgaaagaagaccgcgtgttaatcattgacgactttttagcgaacggacaggcggcagaaggacttttatccatcgtaaaacaagcaggcgcagcggtttgcgggatcggaatcgtcattgaaaagtcatttcagccgggaagagatgagctggtgaaaaaaggatgccgggtcgaatcactggcgagaattcaatcgcttgaagacggaaaagtgacatttgtacaggaggtccgttcatgaaaaacggctatgccaaaacactttccctcggtatccaacacgtgcttgccatgtatgccggcgccgtcgtcgttcctttaattgtaggagcggcattgggactgaacgcagaacagctgacatatctcgtatcaattgacatttttatgtgcggggcggctacgctgcttcaagtatggaggaataaatgtttcggcatcggcttgcctgttgtgctcggctgtacgttcaccgcggtagcgccgattatttccatcggtaaggagtacgggatttcagccatttacggaagcattttggcatcgggtctgcttgtcattctgctgtcgtttttcttcggcaagctcgtatcctttttcccgcctgtcgtaaccggatctgtcgtaagagttattgattgagtacgacataaacctagttatagtagaccttgatattcaaattcttcgtaccatctcccaaatcctcgaccgtataggttacatgactaatgagcatctttagtattaagtttatctcagagttagacatcccgtaagtagactcaatcatctcctgcactttatgatggctccatttttctttttttgtctcagcgctaagagcgttttgaaattcagtagatgcaattaattctgctaagtcattttcagctttttgaagtgtttcttgtgaaattttcagcttttctttgtactctgttttactgatgtctccatctaagtacatttcttttatgcgttctattcttccttttgcctttttaacagctttttctcttaaaccaataagctgagttgtgtaagagtcatcgttaacatcttgctcagtgggggagaagagagcttcattgtatttttttatttccttcataattgactggaacaatacctcttcatgaattccttttgtttgttcgcattcttttgttctttcagcagattttcgtaaacactttctaacgtgtttttttctgcctttgggctgttctatagcttgagctttatgacaataaggacatctaacaataccagaaagcctgtgggtattcatatttagacgtctaccagccaatttatatgttctaagtttttctattctattcaggattagtgcatgctcttcatcagttttcatggtttcatgatgaccttttgcaattaatacttcatctaaatttttattttgaacaatactgttgttgcttttgcttttcttgtatttgccaaaccatacataacccctatgaaaatcattagagagaatctcagaaacaacttctccgtaccaaatagaacggccggatggggaagggactttcagttcgtttaacatctcagcaattactgtacaagaatgttcctcttctaagaaccatttaatcatcattctatatatttttttcttttcctcaacaactactgcagctttgagattcttgtcccacttataaccgtatggaactgaccctgaatgcagtctgccttctcttgtggcatttttctttccattaatcgttctccgttttattgctctatattcacttcgagcaataattgattcaaactcagaaagcatttcgtcgccttcgattgataaatcataggtttttttgggtgtaataaacaatgtcccactttgcttaaatgcttcaagtatccgtccggaatcaatttgtgaccctctagagagtctgtccattgctacagcacaaactgcgtcaaactcgccattttcaattctgggcaacaacattgagaacattggtcgttcatcaatagtctcacctgagacaacttcctcaaaccactgaacatttttaaagttctctctttttatgagatattctaactcatttctatgtttggcgagcgtatcttctgaatctctgtcttctctggattttcttgagtaaactgctatttttgaattttcgtgtaacgccaagtatttcatcctttcttcttattgtaagtgtagttagattatatcatgcgcattggaatttctttataaaatcctcattttaacgaaacatttttaggtcagcttgcttattaatctaatttaaagtattctaattgatgtatcataggggtttaacagccactatagaccacagagtccctcacagcgctctgtggttttttatttagatagaatatacccaaataaaaaagaagcctcagagggcttcaaaatgattaattcttctcacatgcaaagttatcattgtcgcgatccattttagatgtataggcagggtgagtgcttggtacaccatgtggatatttctttctcaactctgtacagtttgcaaagtgttctgttcctccagtagaaggggaggcttgtgtagagttagaagagctgcttgatgctgaactacttgaatgtgaactgtttgagctcgatttatgtgtctcggattggtgtgttgtaactgacttttgagccggcttagatacacttactgatttcttcggcttcgttacgcagccattaaatcctttatcagtcgcatatccattcttactccaaatcttcaagtctttatctttcgcagcttgctcatctttcttatacgtgtctaaatacttcgtgtttggctcatacacataagctactcgtgctaatccttctttaagaagtgtttcttgaacagatttaccgtctacataaacgtaagccagcattctgccatacttgtctgtacgatctcctttatcaaactccagttgaagtttgccgttattgactagctgcttgtttcttgctgaagcatcctcaccatatggttgcacacaagagtttggctttttagtttcaggagtgtcaaccagcaaataacgaactgttttgatttcgcctttatagttaactttaattgtgtctccgtcaactgttctgttaagcgttacatcgaccagctttttcttattttcagatttctttttatccgacgaatccttctttgaagcattttcggctttttcattcttgtcattattgcttttgtcgtttgcttgggtgtctgcctttgtctcttttgcattcttttcttcttgctgcgttgttttagctttatctgaatctgttttatctgtagaagcagaatcagacccacacgcagccaaagaaaagcttagagataatgcggcaatacctaacaaccatttcttcattgtaattcccccaaatttgtttgttctgtctctatatcggacaaaccttcctaattataaatataaagccaaagattgtaaatttgattttgtcattttaaaacactcaaataaagttgtgtggtaaaatttagtggtctaaaccttagaggagggaaagttatatggaagaagggaagttaattcaaatgactcttaatggaataaaggaagctgtttctaaatacggaacattccctatgtttcatcatggagggtatgtcatggaagatgctacttttcatttcaaagatcctgctagtcctcaagaaattagcgatatagaacagaagctaggtgttaccttccctaatgactataaagagtttttgttacagcacaatgggatggaaatgtttgatgggattgaaatacttagcttagagggaatcattgaatataatgaggttcaagatttcccagagggatacgttttaattggatatcattttgatggaagatatgtcatagacacaaacaaatcaaaaaatggattaggttatatgctatatctagactcaattgatgatattgaagatgcgattaacttaaattcgaattttgaaatatggtttgacatgttggtgtcatcaaatggagctaaatactgggaagtgaagccgaaaatccaagagtattataaatatatttcagaatagaaaatttagataagattaagtgggaaggagccagatatgaaagtattcgaagcagcctcgttcatttcagccgcagaaaagcgggcaaaacaatacgatcagattagagaacaatttatcaatctcagaaaagcgtttcagggaatggctgacttagacgacagtgagttttcaggcaaaggcgccgacaacattaaagcattctttcaagaccacgccggcgtcacagacagctggcttgatctgatcgatatgaagattgcgtttcttaacagtatttcaggaaaagtagctgatgcaggattagtcaattcgtttgtggaagagtcatttttagaacatgagttgattcatgcgaataataaatcaaaagccatcatgcaagagcagcggaatgaaatgagggatattcttaatgagataagcgatattgtttatcttgatgttttctcgacagaggatgtcgatcaaaaactggattcagcagataagaaacgggacaataccatacacaagctcggaaagctcgatcatgatctaacgaaggaatacgcagaaaccgaagcgaacgagcatttcatccaagccgactttcaacaactccaaaatgccacgggtaaagggaaaaacgcaacaccacttcactataacgccaaggcgtacagagaaagtgacatacataagaaaaaaggcgagattgcaagacattcggatgcttatttgacgattaaaaaagaagaagcgaaagagcgggaaatcaaggatctaaagaaaaagctggctgatggtgtcactgatcctgatgaatacttagagattgcgaagaaaatcggttacgagaaccttgaaccttcccagcagcaatatgtcattcagcttgaacaagcaaaacagatggaagaagccggagaagtgacttgggatattttaaaaggagccggcgttggtttatatgacgttgggaaagatacggtaaccggcttatggcagctgatcagcaagcctgatgaagttgttgagggtatcgtaggggcagttgctcatccgattaacacgtataatgccatttctacagctattgaggaatcgtatcaaaaggatatggtaaatggagatgcgtattccaggtcaagatgggtgacatatgcgataggtacagtagttacctctgtagtaggcacaaagggagccggttcacttacaaaagcagatgtagctggaaaagtcacctctaaagtcagcaaagcaggccaaaagctgaaagatgcctcaattgctgatttattgccttataatccacgttacgatgttgttccagctggaggagttccttataatgtagttaacagtggaggattgaaagacagtatattaaactttgccaaaaaacaaaacagtatcttcggcacttccccgactggtagaaggctcccagtacccaaagtacctcctataactgttaaatacggagaacattatgcgaaatggtcgagaagaaagacactaaaacccaatgttatttataaaacaaaagaaggctattcctataaaaccgacaactatggcagaattacaaatgttgatgctgatttgcaattaggtgagggaaaaagaaatcaatatgctcagtccaatgtaggtaagcctcaagatagattaccagatgatgatggaggtcatttgattggcagtcaatttaaaggatcaggagaaattgataatctaatagcccaaaacagtcaagttaaccgttctggtggggaatggtacaaaatggagactgaatgggcaaatgcattaaaagaagaacctccaagaaaagttaaagtgaaaatttcacctgtttataaaggagattcactaaggccagattcttttgagataatgtaccatattgaaggaaaagggttttatgaaaaaattataaaaaataaacctggaggttgagcacgttggagacaaaactaaacaatctatataaagagattgcagaaacaataaatgaaatgatccccgagcaatgggaaaagttttggttttatgcacaagtttcggaaacaggaggaggaacttatttttattacaatactcctgacgagccacaaaattacaagtatagcttagaagtaccttttattttcacaattgatgaagatgaatttactgagaaaaagagaaagttgtttgatctgagtgagaagctgcgagaagtattcaaggagaacgatcaagaattatggtattcgtttacgctaagccttgaaagaacaggcaaattaaatatcagttttgattacactgattggttcagcactgattacagcttcagtgatcaacacatcatttggaaacataagtatctaggtgaggaaccgtctgatgcgtctctaaaagggataattgagaaatataaagctgattatcctgaaaacccgatctaagtggggattttggaatgagtatacacgatatcactgaaaagatgaacaaatttaatttaaagtattacgcatcaagggatgaacaagaaagcaaaagaaaaatcaaagcatttgaaaacgaattaaacataaatcttgatgaggtgtacaaagaattcgttgtaagatatggcggaagcacgatacaagcagataatgttttatttccaagcttagaagagaatccattggctagtaataattatttaagattagggctattttattggtttgggataggcgatactgactttgatgtcaaatcaatgacagttacttataaagaacaaatgccagattggattatcccgattgctgatgctgatggaggagatcaaatttgtcttggtgtgaaaggagaagcagcaggaaaagtttatttttgggatcatgaattgacaaatggagtaaaagacacatttttggtcgcaaactctttctctgacttcattcaaagtctgtttatagaagaggcaacagatggggacgatgaagacgatggtattttatctattgagctagatgatgatttattaaacagttaagcaaaaatattgcaattgtgacgaggtagcctggaacagggattctcaatcaaagttgaagtggtttattccataaagcaatagtattgcaaataccatttttatgtggttataattagtgtaggtaatacagttatatgattatttgtgcattttgatttgtggaaatgcataaaataaaaagaccagggtgctaccaacaccccggctttgtacaaaaagctgcccatcaaagggcttgctcagcagttgttcatgatagacctaacccttcaggtttccaggctcaagggaggtctattttttatttatatacgtcaacagggcgattataaacgacccgaatgcaagcattaacattaatgcctgaaatgttgacataagcatcaccccctttcgtaggggatgagcaaggctcccttgagtgagcatgctttaatgtacaggaatcattatacactaattccaaatatatgtctgtgattatcggagccttattgccaatagacaagttataatgtagtacttttctttttggaatttgtgttataagatatattaagattttcaacaagagaggaaatttatcatgaagaaagaaattttgctaattcataatggctcaagcattacatatgcagacccacatgaagctgctaggagttatgctaaagctgtcattgatggggtaaatcctaatgaaatagaactatatactgacattgccgtaaatcttaaagaccaagctaaactgatgaaacgatttaaccaggaactatctaagattgtaaatacaagaattcctatgattgaaaaaaacacaaaagagctaagcaatgaaatggaaaattcacatcaaatttatattggaatttcaaaagaaagtataaaaagaaaaaggatcagaaagaccaaaataagcagagcatgactaaaggagaatctggcgttggaatttactttagctaaacaggttttaaagttttcattaacaagtggcaaaagggcagaaataaatgtgccaccaatgctcaataaacaagacattaagatattaaaaagccaattaagtgttatggagatgcaaacaaaaatatctaatgaagatatgaaaagaaaaaggattagaaaaacgaaaataagcaggctataaaaaacagcccttcatttgcgtgatccgaaaggaaaacaatgcttcatgccgtgaaaataaattactatgtccccccttacaagcatacattgtgatatgtaagggggatttttcttgcctagataccggagagctcttcgcaagagagggcctttgccttttcgatatgtgcttcttctgtcgtttgctttttttatgatatcgacggtcatcagcctttggatgatcaactcctcaatcaaaccggtgctgatgaacatcggagaaatggaaaccaaacgggtggcgacagaggtcattacagaatccatagaagaatacatgtctcacagtgacaatgtgaaagatatggtcgatatgaaaacggatgaaaacggaaaagtcacaacgatggattttaatacacaaatggtcaacagtatgaaggcgaaagtgacaaagcagcttcaggctcatctgaaggaagtggagtcgaacaataagcagcatgaaacggaaaaaggcgcgaaaacggccgatgaaattatgatcgatattcccttagggcaggtcacgggaaacagcattctcgggaatctcgggccgaaaatccccgtgcgctttaacctgatcggtgatgcgttaactgatgtgaaaacaaaaataaagccgtacggcattaataatgccctgatcgatatcagtatttttgtggaaattaaggtaaaggttattatcccgtttgccagtaaaacatcagtcgtgacaaataatataccggtctccattaaagcgattcaaggagaggtgccacagttttataacggaagcggcgggtcaggtgtaacgccttccattcagctaccgaatgaaaaacaagagaaatccggagccgataaagacaaataaagacacacagccgcaatctttttaggcggctgtttttacttttcctgcggatttattgaaactgaactcaagtatcgactagtagagcagctcataaggttagtggacacttgatgaatagtcatttccaacaattacatcgaactattgttcttatttatattgaataaagaacgtttgttctgttaatattagatcaataaaggagtgattcaaaatgcttagagatcgaggagcaatcaaatggacttccatgatgcttccagaacatttaacgcaactaaaacaggacttgttagatgtttcgaaaatggagaagccatctttagatgaacaacaaattgaggagattgacatcttggtttctgaagcaatggcgctgaataaagaactaaagtttaagctctttaaagaaggagttgccgaggatttaattggtacagttcaatatctcaattatgaacaacacaaattacatgtaaaagatcatagcgatcaaaccgtatacatcaccatgaatgacatcataggagttgcttacaatgattgattactcacagtttccacgtaaaaatatactttgtgtagatatgaaatccttttatgcttcggtttcagctgtaacaatgggattgaatccaatgacatgttatctcgctgtagttggaaacacggatagacagggaagtgttgtcttagcagcatctcctgcacttaaaaaagattatggaatcaagactggttcccggttatttgagattccagatgatccgagaattcacatagtaaacccgcaaatgaaacttttcatcagagtttcaactgagatcactaaattgttttacaggttcgttcctgaaacatgtgtgcacacgtactcaattgatgaatcttttttagatgcaggaaaagaaaatcctgaagtcatggcagaagcaattcagagcagtatgaagagagagttcggcttagtttgtactgttggtattggtgacaatatgctactgagtaagttagctcttgatttagagagcaagaaaacaaagaatgggatagcacgatggaggtacgaagatgttccgaaaaaactttggcgtgttcatccgttatctgaaatgtggggaataggagggaggatggagaggaatttaaacaggatggggatttcaactgttggtcaattagctaattatccattagagctgcttgaaaaacgattcggcattatgggcaatcagctttattatcatgctcatggaatcgacctttctgaaattggagctcctttgatgcagggacagattagttacgggaaaagtcagatattacttagagactatacgaagaaagaggatatcaaggcggttctcttggagatttgtgaagaggttgcacggagagcgcgaacgcataataaagtagggcgcacaatcagcttgggaattggttacagtaaagatgagttcggcggtggctttcacagagctaaaacaattgatttacctacaaatatcacaatggatatttatcgaaattgcttgatgttatttgataagttctatacaggcaaaacggtacgaagtgtttcagttactttatctaatattgaagacgatgtgaatcaacaattgagcctgtttgaaaaagataatgagaagagaagaaagcttggatttgttatggacgggataagaaacaaatacggatctaaagcgatcttacgagctgtttcttatacacctggaggcacagctttgcatagagcaggtttgacgggtggacataaatcatgagaacagagagcaactccctctgttctccttacaaagtcattagttttttacgtttcggctctttcagcaaccttgaacgtatcattttgttgttggagataggaagcacccactgttccggcaacgccgaataatagaactgcacagataaatagtttagttttcatattgcttctccccttttgatttgtcttcttgcttcatttgccaaacgataaaattcaactgcaccccaagcatcctgttttccagtgagaaaatctgctacagagacaccatagctttccatgtcagggtatatacttctttctttgaagaactcgaatgttttcctaactaagtctaaatcatagtccaagaaaagtcctttaaccatttttaacttttcaagtaccatttcattgttatgccgttcagccaactgtttggcctgttcataaaatttttttgcgttttcaatgtcattttgccttccctttaagaaggagataacaaataatgttttagcagcgtaatcatgattttccggctcaatgatttgaagtgacttattaaagtgaaaaaatgctttatcaagttcttccatttgattataacataatccaatattaaacagtgctgaacgcatcaaatgtccacgattcttttcacttttgtttagctctactgcttcctgatacgctttgtatgcttgctttaaagcttcatcaaacttcatactgtccaataaattaccaaatatgacgaattgacagcgtaccttttgtaccccgtatgtagggctcccgtcaatagcaggttgctttttaaatatatcgtaagccctcatggcataattcattgaaaaataagtctgtttcatgtggtaatacacttctgacaatttaaaataaaattcagctttttcaacttcaacatcttcgctctcaattgaatccaaatatctctcagcttgtctatagtgattaagggagaatgccaactccttttgtctaaaatagaacatgcccatgaaaaaataatagtaatattcgagcattcctgttaagttttcatggccttcatatgcttttaactcaccataatttttctcaatgttttttatagcgttaggatacatatatgccaacattagcttatgtctaaactcaagtagggagtagtatagtaaaacatcttggttttcttccataatttttatttcctgcataacttctttacgcatttcttctgctctaccgacccaattctttttaatagccacataccaatgattcatctttgttgctactaaatcataaggaatgaccttttcgttctccaagtcctaaacccctttcaaatccattttattatatagttgcattggaggaaagaaatgtaaagggaatttgagtgaaaattaaaaacaaatcaataattcgattatgaacgaaacgaaaaaaataccctcctcgttagagaagggtatatgatcagtttgctgttgcttttagagaagcaagccactcatctaatgttccagagaaaccttgttgaacggctaattcatatgctgattttccatctttaccggcagcaccagtagctcctttagcaccggttgcaccagtatcacctttgtctcccttagcgccagtagctccagtgttgcctttttcaccttttagtgaagctaaccattcctctacagttcctgaaaaaccattgtccactgcaatatcataagcagacttcccagtgacaattgagacattaaccatcggattgaagaaactcatttatgcgcccccaaaaaattatatgttattcctgactcagaaatcttgaagcttgtgataggtgaatcatgagcgtccatttgaaagccttgcccagctcttaaatagataggatcaccaccattgattgatacgtggcattcctgatcattcgaaaagctgaacttatagaaagaatatttaatcgtccaggttgcaggtggggaagggatcacttcatggttagattctgacttctcaagcattggactcccgatatatccagatcctatttgcatgaccaacaatcattcctttcttaattaaaaatgaaaaaaaggggagatgagctcccctgagttattttggttctgtgtattccattgcttgatcactatctgagatacctgtagtggttggatccaccacaattcccatggcagttaaaaatgtcaacagcgcattaaatttctcagtgagatcatcactaaacacagaaatatcgtatccaaaagctgatgcaattgcttgtgcgaataaaagagttgcggagaagattgcaaccaggaatgttttctttttaagtcttactttccagttaattttagtcatgaaattcgctcctgttcattttatttaagcccaaaatgtatgagtaaccaggctgcgacaatagtcgcaattacactgggcagtaccttaaacacaaggtctttagtaaactgagagggatcaattttgcgagtagaatcagagcgttccaatatttcaactcgattgtccagtttttcatatgatttactcagattttttaaactgttgctcatttcgttcagagtgctgaactgttctctcgattgtgcttgagaatccttattaatttcgacttgctgctcaacaagcgtagcaatacgaccaataacatttgttctttcttcaagagagtcaattttgttatcagtgtgcttagctttttcttcaagtgcacttaatcttgaaatggtgctttgctcaaagttatccatttgtcaccaacctttgataaaatagaaaggtgacattacatcacctcctaaaataagaggataatcattgatatatctcgatcaacaatcatcctcaaagatatttaaatatatttagatttttgacccaaattgtcctgagatgtagccgcgtttacctttgtagataacttcccagtaacccttagcattgtttgaccctttcactgagccagaaatgctgagtgtgtcacctagcttcacagtgccgagattcttcgctttgtttttatcgggtctgtccataacgattgcagcgctttgtacaccgacaattttaattttgcctacagatttgataccactgcttttaggcttagaagtggatttaggctttggggttgattgtccaagttcagcatcacttttaatgtatttcacatttacgtaaccgctgtatgtagcacctttagagtttgtatatttgatatatccccaaccattttgagttgatcctttttggtattggacagtggagcctttaggaagagcgagtacaatagaggagtttgcattgcgttgggttctcacattaagactgtcagcgataactgtgtttttaacataagaaccatttgttttaacaacgtttgttggctttgaagatgaggaagaagtatttccgtccagtgctttcaattcagcagcaatagcagctttaacagcattccaacgaccttcatcaagaactcgatgcgggcagtacttgccagaccagtcttgatgctttttaactcgatccacaccccagccacgttctttaaggagttgtgcaataaacttaatagccaacgcttcagcttttctgtagcgctctccacctgatttggagtagcaaacctctacaccaatagaagtacggtttcctgaattcgcacctgatccatcaccagtgtgccatgcgtttcgatttgtaggtaaaccttggacgacctcttcatcatcaacggcgaagtgataagaaacttcattgttgttgccgatcatgtagcgaatttcagcgtctgcagatgcatcattggctgtgttatgaaatgtaatataagaggctgataacgtatacggacacttaatagagtatttgctggttgagacaagattttctcttacttgaatagccatattaaacatctctcctaaaaattaaatttgagcacaaaaaagagagaaggggcaaatcccaatctctctttatctcacgtatgctcttgttatctctgtttttgaatgctgtaaattaaataaaatttatattttaactagaacataaccacctcctttaattttgagggattacttaattaagcagatggcaatgccatagccaagcttgtctgaatatggggttacaatctccatagccttccaagagtaaaacctgtcttctgtttttgtgccgatgccataattaccttcaatacgatctcccacagaaacagtgctgtccactttcacataaacctgtccaagtaagccgactatgttccattcagggcgttcttcacgggggacgtaatctattttttcaatccattcagggtttactttaggcagtttcttaacatcaccggtttctgggttgactacatcttcatatatgtatccaccaaattcattctttaaatatctaccttgccagtgaatatcagctccgcctaaaatagttcctgcagtttcggagattactccgtgtacatcttcaccttttctcgctgggcgaattttagctccttcaagagtgacaattgttcctgtcggaattgcttttccgtcaaggctttcaaaatattcagcgtaatcactgaaagtggctccgccattcatcttgccggtagatgttatatctccgttcatggagtttagcatccatttgatattcgctcttgatggggtagaaccatatccaccaaccaccatatagcgatcatttgtaccgagtttgactcctcccgaagataagatagttcgtgagacattatcgccttcaatgtgggattcgtttgaagacatgactgtgctacgcgaaccgctaacggaacttgctccggaagaggaaaacactcctgttctaacaccagttgcttttgccccaccagtggtgcctataacagcagaagcttcacctgatacttcaggctgtccagtagacgctgctattaagccggtgctagatttgggtactccagaagaggtggcaatccttgtcccgccttttatattatttggtacaaaagtgtaatcaactcctgcaattctggcagcctttttgtatttttccactgaaattcccattaggcttacctgagaattagaacaatatacaccaatactgtcagctttcccgtcgcctatcaaacttgcattaataagctttacattttctgtgccactgccaatacgcacaccgattctcgccgattcaaaacaatttacatttgaaatatttacattatctgatttttgatccccaccgtatacataaatgtcagctccagctgttttgaagttagaaatagagagattgtttaaattgatgtttcttgatttaaattgcgtagcgattgcgggatttcctttgtaatcataagaagggtctccaattgcgttaaagtttgaaatgttgacatttctgtaagctgagattactagtgcccgtgggctcaactctttataaaggtcactaaagattggagacttcgcagtacagttaacaacattaatgtcgaatgcactagtggagattttatcagaagcacgatgaaagccgatgtgtctaaaatcaaatgcacgaatgtcattctctgagtagcagttgattaaatttacgtttcttgctgcaggcgctctattgtgggctttaacttcaaaacctctgcagtttttctgactgttgcagttcaccagccatacgtttctagaaccgtcatcaatttcaaaaccatttgaatttgatgagcctttgtcatgagcagacccattggcattgtatgcgtgacagttagtgaagtagatgtattcagaatagtgagttgtgaagccatcgtcaccgaaattagttgcagtacagttttcaatccaaacatatctactgcccttcggttgataataatcagcaccatctgaagaagtgttccaaataggagagcttacatcaaaaccatgaagaccgggatttcgagcattgacgtttctaacccgaacaaatttagagttaacaatacccacacagtttgcatttgttccatttgtaatggtgttgtcctttttgtctaaattccaatcgaggtctaagtcttcaattaagatatattcatttccgtttgtgtagtcgctattggttaacacacaagatgttccggtagcagttgggtgaagcttgataatagatcctgatccaacaccgtaaagtctgacataagaagggatatgtaatccttgaaccatataaatacctgcgggtacaaaaacttctcgcttcccgctggaaaaagcagctttaaaagcttcagagtcatcagtaaccccgtcacccttagctccaaaatcctgaacattgacacttcgtctgataaattcatttaagactttatcaacaattgttgcaccgggtgctgggatttttgaaatgtctccaatagtgtttgtgatatctgttaaaccagaatcgactgtgcttattacgtttttaatatccttagaagctttatcaaaagcctcttgaatatcgtctgcagtatatctgatattatttgattttaaccctatagcatcaatgggtatccattgctctgtttcttcgtccatataacccattgtgtttacgggaattaaattgtcgctcaatatatactcctccttatccttttctaatccaaaccatacttccgtcagggggttctacagaaggttttatcctcatctttttgggagcattgttcgttctcaaccatactgatctgatgttgtaaggctcaacatagctggaaacaatgttgaaaccatcatacttatctgacacgctaatatttatccagtcgaaaccatcccatcgatattcaatgcctgtttcttttacagtgacagtccaaccaatttgaggggaaggataagtgtttaataaatcctgataggtgtacacaaacggcaagtaaatcttcctagtgttttcaactacatattcataatctgatgttgcttgtctgcaccaatttgttatttcaatacatcgcttggtgacacgttcacattcagcaatacgctcattgatacgaataatggcatcttcagcatcatcaactaagccttgaagcgtttcaatgaccatatttccttgtcgtttaatccaaattcttgaggcagggaagaaggatgcgccttctccttgatatgtaaaagtaagtgatttgccttcatttgaaccattgaaaaagacaactcccataaggtaatcaaccttaaagtagttgtcttctaattcaccattttcaatttctcgccattctttactgtcaccactaacctcgactctgtactcacggttaggtacttctgtaagtaagactcgaccattgtaaacagttaaagtttcactatagcttaaataagggtcatcgattgaacccttccttttttgagaaagggtagggtcgttatagagctgaggaaaatccaaactaaattcaccgtcctttctttatgtgtaattgatttgagcaattcttccaagtgcgcgactctctcttctaaactctgcagtcttttctctctaagcctttttccgtgtactcctaacaattcccatgatcactatatatacaatcgcaataccaacagttacaccctcaatttttataaaaaaactattcaaaattattaataaaaacgctagtactgacgcaaaccagtgtatagattcatattttttgtcactcattgctgatcccctcactctttctgttaaacactttatataccaaaatccatcatgacacaatttctactatgggttcaagtggaaaaatggtttataatttacaaggtatttttaagtaaaaaaggggtattatcgtatgaaaacggacaagtctttgcataaaagaagaattttatttaaaagtcatctgtttagtggaaaaataggggagtaaagactgaggttatcgacgatttcttaatgattgaaaaggaatctaatatataaataaagtgggctttaaaacaaaaagacgtagccaatagcgcctgtttagtttacatggctatatgcttcccatatatacttgatgtttaatttattccctctttgattgctgtctgagcctgttataaatccaaattcgttcatacttccgtatgtagagtttcccccaaccagggatatccccatttcatttacctgatacgtataaccccctgtttcatcaattaatagcatggaatcattagaagacactggccacacttttacatgtgttggagtgaaaggcagcaatatctgtttactaattgttccatcacccacatacgttcctttagccatctgaggaacatcagaggatagcgcatattctgagtgtagtttaccaccaagaaactcagcgtttccatctatggaacctgtaatgattccccggtcattacgtacaggtattgtattaggcgtggatagcgttgaagtcgtgtaaccatttaatgaatcagccgatcccgcagaagacacaatccactcttcgccattaaaaagctcctgtttattagtctttggatcgatccaaatcgttcccgattctggcgcaataggctttgtctctgtagatattgtataaagtccgttaacttttccatcgagacttcctttcacttcaacggaattagaggggaggtaaggattttcgtttggatgaagagattttacaatgtcagatccaataaactgagttatctctatgtctgcatcaactcgtcgataggcttgaatgccaatggtgtagtacatattggaggggagtcctgtaaatgtagcagctcgtttgtcatactttacattcttcaggtcttcacttgccatttttgagccgaaaacatattcttcatttttattgcttccatggagatatatttcaaaaccatcaatattgtattgatcttcgtctgattcaacatagtcccattggaaagttacatcaacagaaccatcatcattggttgtatgagaaatcgcagttccgtcctttgctataataggggaggctggtttaacagcaatcctgtcattgcgtaggttgaagttttcagtaacctcatcgtacttgatttttcttttgtttgtctccgtgctaattttatttgttcgataaactgttttcagcatgttctcaaaatccgatgaagcgcgtttaccgtttgaaactgtaacgctcaagttagactgttcaaaatcaatcgaaatagctgttattgttgcttttacattggtatagaagcttttctgttgtacccttacgatgtcgccaagagaaaacctgtcccaattatgtttttcactaatgcaattgaaaaagttcactaaacctaatgctagattaacagctggtgcatttcggttctcaagttcttcgtttgcaacgtcatataattcattctcatcaaagatactgtcattagaccattcggctgtaataatgtattttgaaagttctttctggagttcagtgctgaagttcttttcaaaagacagtttatctttaagggcggtaatctgtgttgaaatttgtgtaatagaagcttgtattgctttaatttcttctttttttgattcaacttcttttgatttagcatctctttgctttattagatcagtagtatcatcgccggctttacttgcaactgtaatcctgtccaatatcttttggaaatcaagctgtaaagtatataggtcattattcgatgctgtttctttttcctcggctttctttttctcatctaaaagtttgtagaaagaactgccttcattattaaccaggtcgttgtaatctaaaattgcatgacaaagtgcatcagacatgtagttgcttctttggattacatttcgtgtctggtcacgctgaaaagggtagaggaagtacgaaaaatcgtctatgtatgattgtccggttggatttacggagttgatgcttaatccatctttgcctgtagcataaatccttgtaacgacatcatccatatcctcaatgtcatccagagaaatcatatattgggcaggggttattttgagacccttgtatttagacacatcagattctttgtaaaaatcaacagtacagtcaattgtattaaagacaggaattgcttcgaatttctcacaaatcgaatacataaaatcaagcttgtttgaagaagaaatatcaaactgtctgtattttaaattgaagaggggatcaatgaaaccgatagaccattcagtattttttaggcagtcggtagcggcctctttaagatttttcgaagtttcttcatacttaatgacaccttgcttagaaagtacatattgaagtgatttgcattcaacctggatagtgtccatatcattgctgtatgatttggttttcttgactactgtaaaccagattgtaagtccataaaattctgattttattaagtaccaaggcctcagtaaatcaacaatatgattccgtttatttacaccatcgtaagtagcagttaaagggattgagaatgttaattcgtgtacattactgccatgattgagtgttaccataggattgattacttcatcaatatttgcgatctttgttttatttggtttagccagggaaagacgaatatctttaatttccgtgtctttacgaattgtaatcaaatgtctaacccctcctacaaatacttgtatctaaatgaaaatcttaatttacaattgcctgtaacctttaatctgttccttccaaagcccaatctcaagtactggtcattaaaatcgtcatagcgctcattgccataaagattagactcaataatttctttttcgccgtttatttttaagagctccttatttttcaagttgctgaataaaaacggttcgctgaaatcactgagattttcgatttttatgtcaccatcaccaattttcaatatttctaaagaggggaagatgtttacatcgcctttattatgcaactcaacaatttcagtaccagaggatatatcaaatgcatgagtgattgcatttcgactgtaagcgtaaggggagttgcatttcatagttaaccggacgtagccattacgagcggcattatgaactaaatcagctgtatctactggcattgcataataaacgatatcaaggttttggctaaacgcaaaaggcttgtaatcatctacacttaaccaacgtttaattgctcgtacattcttttcatcaaactgatcaccaagataaaaattcaatgggaattgcttaggttcctgtttaacaccttcagtgtagggctcaggccgcccctttacataagtctcattaactgttcttgagcctaaaaacggttcttcgaccaagcctgaatcagtgttaacatttgtgacgccatagtcacttgatttttcgtcattaaataaaaaatagaggctttctctaatcaatttttatcacctcaaaaataagaagagccagcatattaactggctcatgagttgttgaaatttatgcctttgtttttaagaccatttgcaaatttattgaatacaaaatcagctgttttctgaggattccctgattcgttaatggtgaattcaactttaaaatcattgttgtttacagtgccatttactgacttagctgcgtctggtggggaagagaggttttgaatagtcgggatcaaactattagaaagactcgattgattaatattcggaattattgatgggatagttgtgattcctttgttaatcaaggctgctaattttccaccttgcccccatttaggtgtctcttcacttggaatattgttctcacgtacagcttttactgtatctaagatgtttgcagtatcagttttattaaggatgagttctttatcatgaaggaaagcgagtttacctgcgcctagtcctgtacctgtatatccacccgatgcaaaagaggatacctttttcccagttttattacctttggtcacagtattcagggcattggaggcttctttaagcttatcgatcaggttattggagatgcttttccctatggactccatattgctgttaatgaacttagagaattcattcagttgcttagcaatatcggtaattttcccatccattagctttttctcaagatccttaaatccacgctcatcattgacgagatcatcatatttcttgttaattgaatcttcatctttttgaagctgatcttgtaacgattcttttcgtttactgttttcacgatctttaagaaactcatctaatgcttcttgctgttcttgaagttgcttttctaagtctttaacctgtgattttgcttcatctgagtcatcgagagacagtttatttagcttatctttggtttcctgaatagcctgattcttttctttgagctctttttggtatttagcttcatcatcagttttatcaatctcatcaatcaagtcttgcgtagctttttggtgcgcttttaattcaatatcacgcatcttttcgtacatctctttatagatggagacaacttcatcagcaagagatttgtacacatctttgattgatttctttgtgttgtaaagctccagattgtaatccttctgcttatctttccaattttcgatctcctctgtgatttgtttctggatgtcaggaaagccctttgctgctttcttttgtgcttccaactgtttgatatacttcttcgcttcagtctgttgctgctgaataagcttaatctgttggctataatatttaaccttgtctttatcttcctcggtcatggatattttgttgctaacatctttaagcttagattcagttttcttggttgatttctcaataccgttaagcgtttcgtcaactttagattggatgagctgtccctgaagttctcttacttcttcttgaaagttgatgagatcaatcttagcttgttttaattcctcagcaagctgtgctctttgagcagcattcaaagttttgtttgttttgatttctttttcaataaaagaaaccttttgactctgaatcttttgctgttcagttaaagcttttttctgatcgtttgtatacttacggaactctttactgtcgctcagatagtgactagcgagggctttgtctttagcgattcttacatcaaaatcaccaatacgcttgtcatattcatcgagtttcgattgaacgatttcatatctgagttcctgtatctgatcgtttactgaatcaatatcaccttgaagagagagaaggtcggatttagcttgcgctattgcttgttgtcgttctgcttcggcttgggatgcatctgaaatagatgtaccgacaccttttaaatacttctcaggatcaatcgtctttccgttttcctcaatttgaagatgaaggtgatttcctgttgaattacccgtactgccaactttaccaatggtctggccagctttaacagtttgaccggctttaacagaaggggtatcaagcatatgcatatacttagcaacttttccatcatcctgttgaatgacaacccagttaccggcagttttactataaccagcaatttgaacttttccactctgaacggatttaattgcggttccagcttttgctgcgaagtcgatacctttatgtggagttgatcggtaagcgccatcttgcgcattatatttagaacttattctaaacgcactgttcttcgtgtagtagcttgcaatggaggaattagcagaagtcattgacttggtgtaatttgacatgatcttctgaacataattctgagtttccttgaaaggagggacgccgccgtatttgattacattaccaggccctgcgttataagcagcaagtgctttctcaacattgccaccaaatttgcttagttgttgagctaaatatttcgtgccacccataatgctctgataaggatcataaacattgtttacacctaagcttttagcagtggaaggcatcaactgcatcaaaccagcagccccggctccagaacgagcccttgcattgaatcctgattcttgttggattacagctgcaattagagctggatcaacaccgtatttgcttgcggcagaattaatgtagctggagtatttaccggagtaagacccgccaccggaagaataagaaccaccagaagatgaaccagaggaaagggaagaggtaactataccgtattgtgcaatgttccctgacttaatttgatccttgaggagtttggcttgctcctgcataagctttttcttttgttgaagagctttaatttctttctgcagggcatttcgataactttgggaatactttggatagtcgtttacttgcttattatatttttcgacttcagcattaactttctccagagcttccttgtatttatcagccacgtacatagatgttttcatttcctcagaggctttatcacttgaagaagacaggtcatcaagagatgttcctgtttcagatagggaagttgaagccaaatcggccagtttatcaagctctttaagctgatcggtgatatcagtgacctggtttaaatcatcctgtgttttcggtaggaactgtagcgcaccactgttccctttttttagttcgttgtatatctttttcttgttgtcttcaagctcggacttcattttataagcgtcttgaacagtcttgatagccttgacttcagacttatacatattaatctttttgtttaatgcattagcctgattaattagatcttgtcttacagattgttgcatatcattgtaagctttgagttttgtgtcccgaagcttgacaactgcatttctgttgatttttacaacaccattttcaactgaaattgcatcagcaagatcatgttctttctgaataagcttcatggcttctgttgcagatatacttttaccttcagacattttttcaaggaggttgtttaaaggggagatgctgtcagacatagtgtcataagcttcattttgaatagcagatatagcagcatcattttgcttcgattcaactaattcatcgatgattcctttaattgcttcaaaatcacctttagcttctttgagcttgtcagataaattcccgacttgctcacctaatgcatctacaccttcaccattttcatcccaggttactttcgcagtttttgctgaatcatttgtagagtcaatggcagttttaaggtcatcataagataaagccaaaccattagctttatctttgccactcatatattgattaacaagatgttctaagcttttagaggcggaatcaaaattgtttttattgcccgattggagcgctttttggatattttccatgtatttcgaaacatttattgaaaatgactcaagttcatctgcattcattttgctgaagtcaattttatcgaatgcgttagatatttcccttgaaagattcggatttatctttattgagttaaaggcattaattgtctgttgcacttgctctctaattttagcctgtgagctggatagctcttgttcagtacgtagtgcatcttgttcagctttaataccttgattttttttgtcattttcagaagagaaaatatcccaactcttgccgtttttataataatcggcaacctgcttatactgtttaatcttatcattgagtttatcaatgtcttttaagctttccttaaagttactattggcacctgtttgaatgtcttttttgtttaaattactaaggtcttcagtgtactttatagcatccttaagtgcttggtttttctttaagattgcttgtccttgagaatcataaccagcgatcaaattcgggaatgtttgtgctaattgctgtgttacttgcagatattcttgctcctgattggccgataaagccccgccatctttagccttttgcagttctttgtattggctaatcagtttatcagtttcatctttattggttgtaattgcttcaatgctagtagttttagcttgttcaaagtcttccctagcttgttttaattcagaataagaggaaatgagtttctcaataacgacgccaagtccaaccatagctaccattggaagaaaactgcctgctaaaaaagcgcttgtcgagattgcgactttctttagattgctcatcgcaacgcttgaagcattaaccactcgtgtccaaactgcagttttagctgaagctgttgttgcaccaagcccaacagcattaaagtttaagacaagatttttaagggttgatattgcagacattccagttgagatggtagctgtacgaagagaggtgttgaaaagcaggattgcagttgtcgcagaaccaaaaacttgagggaggagcccgactgttttagtaatttgagcacttgtttgcattaatcctttaagtgcatctgcaaaaacaacaatgctattagagatgaaggcttcacttgaggcaaccgacatttctgtaaatgcatttgacagcctgtttaatcttgcctgtaaactgtcagcgtatttctgctgttcactccaagcgcttcctgcggaattagctgcagtagtcgctgcgttttgtgatatggagaaattattcatcaaggcattaaatctagaaagctgataaatgcccgctacacctattgaggtattttgtttttgagcatcactgagggtattccatttgtctgctaactctttaattaaatcagtagcagattttgcctcgccactggcagttttcacagaaataccaatctgttctaaggctttaattgagctattattattcccaatacgtgcgaaaatggttttaagtgagttaccaacaatgtttcctgattcacgggtggtacttgcaattgctgtagtataaccaatcagatcgtttaattcaacgccaaaagtcgaagcggtacttcctgcttttcggattgaattcgctaggtcaagagtagttacagcatagttgttatcgacttcattaagcttatctgcgattgaaatagaatcattcgcagcaatattgaagtttaacattgcggcagttaaagtgttaactgtatcatcaggagttaaatcagagacgttttgtagaacctgagcggttttagtaagcgtagacagttcactttcatcgaaacccatacgcccaaaatcgccagtcatttgcaggatgtcagtgatcttatttgaaagcgtgtcacctaagttgattgactcttgaagaagctcattatacttataatcaggctcattcattacacgtctgatattcgtcattagagtatcaatttcaacagcctgggaaaccatttccttgagcccagatatagcaccatagaacaaagaaccggagatcaaatatgtcgacatgcttttgaaagcttgagttaactctgtgccaaaagaggaggcttgactagacgctgtttgagcatttgaagccaattccctaaattgcatgttcaagctttgcatttgagatctgatattattaccgccggcacttacattaagactatttactgcatttaaataatcttgagcagcttgtctattgccggtacccattgtatcgccgtaacgtgtattaaggttttgtacgtttacctgcgcttgacgttgatacaactcaatagtttttctgagttcattatttttcgccacagcagcagacttatcatcgagcatcttaattctgttttgtaatgcttcaatttgttgtgctgtttgagcagtatttaatttccgtccaagggaagagagggtggtatcagttacaattccttgctgtctaagtttttctaaatccagctttaattgttcaatagcttttcgttgctgatcatagttcgttgttactttagatgtagtagcgtttgtttttggatcagttgtgtaggtaatatcgtcaaagccattgcggttcttttgagtaaccctcgtcgtttgtccttgagcattcttttgttctgttttcttctgtacctgaccaagtttttcagttgcttgagcaagcctgttaacttcttgcgtttgttcacgtaatgattgattgcgattgtctatggtctttgtttcacgctgaatgatttcgccatttttcttatattgttgcgtcaacttttcaacagtgccatcagcatttctggtaatcgttgtagtttctttaactgtttgattgaaggatttaagatgtttttgataagtgtcaactgcagaggagaattcgttgagagtctttaaagcagaggcatcaatattggtctttaaattaagggaattaagctttttctctaaagatttaatttgctgatttaactgttcgacagtttttgaagaagtgtcagctttgggtgtgagtatgatctttaaatcttgactcaaatataggtcacatcctttcgaataggggagagtgatttttagggcatataaaaaagccactcattattgagcgactttgtttgctttccgtattgctatctccataataccttgccatatttcggcatttgataaagcatctttaactttcagatcgtcctgtctaaaccctttaacattctctaggccaaattcatctttactcggtaggaaatcaaatctgtaaataggggaggagaaatcatcgagctttaattttaaatcgatttttttgaagtactttgtttctgtcttattagaagataacccaccaaccaatgctccaatacttcctgctgctaacccaccaacaacagcacctgttatttgacttcctttggacacttttgtaactgtgttatcatcaattgtaacttcagcttgaattattttgctgaaggggacaattctctcttctattgttccatcctgtttgaagctatgaattacaaatttattttctggatcaattaaagtaagctttgcatttttatctggatttatgatggacttataattagaagggaaatttccaaccgtttcaatctcgccagctctttttttgtccatttctttttgcttatccgaagcgctaaccccaataataatgaaagcgccaaccactaaaattagaatgatagcccagatcatccaaccaccaccagtattattttcctacattatatcatgatttccagcagtgtagaaccaacaaaggggacagaaatgaagcattacttcttctctatttcggactttacttgttccaacaggcttctgtattgaatggcgcgtgatcgacaagttctactattatccataccataagtaatgccataaaatatccctacagaaaacataactccaatagaaaccgatgccatggtgggtttaccttcgttagtataagcgaagtagtatacaatataagttacgaataatgtgcttaccgatgttaagcctggtacaatctttgaattatcgaaatactcttcgatatccttcattcttgctatagctaaaattatagtgtcgatatctaagcctcgtattcgttgaagttcagcttttttattagttgaccaatatccaagacggtcactaatgtaagaggctatttctttgttattccatttaaataagacttcttccaaggattttgcttgttttatataaaaggtgttctttttccagaaaggccacacattaaaaatctttacttcaatttgtgaagacggtaaagactctttttcattctttttgtcagccttagcttgttcaagaagggttttaaagtacatagctgttgtcatcactcgtatatctaatataacagcacttagcagtgtgaatacacaaactatcatataaatgaaataaacttcgcttccaattggcagtgtattcataaatataaatttaagtgacccaagtgataaacttaatatacataaaataaacattgtatatttggaatagaaaaaccctgattcaattcgtgccatcttagctattccagaagtgatatctttatcactcagctgttttagatattcaaacttctgccattgttgctcggaattgaggctctcgtttgaaggaaactctttacggataaatctaattagttttcttaattttggtgttgtaatctgagactttacaatttcgataaattccaccaatattcacctcgataatattatcggataaatatggatttttttaagcgattctaagctaaggtttgaacatactatccattaagcgcataaattctatacataagcaaaatccctcaattgaaggattttgattctgcataaaagagggatttcataaagagtgtcgctaaagcaaatcaattgatatgtctcccaacaagcttttcttaatctttccgtattcaagtttaccggtgcttgcattgtaaacaagaactttaccgtcactgatcttggattcatcaatctgtttagatccgaattggttcttatcagctttagtaccaagctgcctagttaattcagcaacagcttcgttcaattcattaatttgctgttgcatattcgcaattgaactttggtgaggattgaagagactcataaggtttacgagaagatttgattcttttcttctttaaaatcacggaggtcgtagtgcttaattgttgtagacacatcattatgctgtgcaacatatttactcacgagctcaatcttaattttcttgacttcaagaaggtaagtaatacaggaggctttaaagaggtgagggttaatgcggcggccgaggatatcagaaagaacatcagaacaaaaatagtcagcccaaccctctgacatttgtcttggttggccaccgtactgtgtagtaaatagatactcatggtcatatccccgttgttcatgccaaagcttcaaatattccagagcttctgtgttaatcatgtagtcgaggggtttcccttcgccttttccttttccaagaactttgtgagccatgacataagattgaccttcaggtatctcataatctaggatttcagttttaaactgaatgatttcagctcttctggcacctacgttgaaggcagtagctaaccaagccatccccaaatagttcttatcttcttcaagcactttcatcattgttctgtattcatcgtaagtaacctttactttttcatacgtggttgttttagggatggcagggagacctcttgtgaagttcctgaatgatttgtaattatcgtcatcttcagcaacaacattttcaatgtagttatttaaagaagatactccagccttttttaaagctattccacttgaagacatccctctatttttaaggaagctttgatatctgatgaaatcccttttggatattttgtaaagcttcttcccattcaaggaattatgcacccaccagaagaactgacgaagagaggagttgtattgcttcctggttttatctcggaatgagtgggcatcaagaaattcttgtgttaagcttctatgctcgtcatcaatctgaccccacatttcatccgtgacttcgggcaacttttcggctctagagcgcatcatgttttgttttatttctctggccattaatacaccaccgttattctgttttaataccacttgcatttaaatcttttttcatagcagcaaccaatcgcccatcttttaacgattcagcggtattcttcataaatgggcgaggttttccataaccataaccgtatttatctggatacgtatatccttgaccagtctcaacaaccgtggcaacatccttaccgttgtcttcacgagtattgtctaatgaaattccgttagattcgttttgaatgacgaaggagtccttcaaaagagacgtacgttcatatgcaagagggtcgtatgtgtcatatacatcagattgcacatgctcttgacccgttttaatcatcgtattttttgtgctggattgcttttgaacggcttgctttgcggcaaattcaattagtgctgctatttcttttatgttcttggccattattcagcctcttgttcattttcaatctcttcgaccttattaaggataagatcatttatttcttcttgagatatgtttgacagtttgtctaaattctcttgcatcatctttgttgcttctctaaatttcttcatgctttcttcagggaaactactaataatcaatgggaaaaattcagagtccacaagcttaacaaaccactttactttgtttttgatatcacttggaatacccaagtctgtaaattctttaattaatgaaaagaatccccattgaacaggattaatatcttcaaacttaattccagcttcttttgcctcttcttgatccgtaattaattcagtaagcattttggttaagcgggtaggggagaagtaagggtaaatataaacatgaacgtcatcagtaagttgcactcgttctttcttgtcatatttgcttacactttcttcgatcaacccaagatttaattttttcgatgccatctcatttcctccttatatatcctctgaactcattaaaaaagacacctcaaaaggggagaggtgtctaaataaaacttgtattttatttataatcttcttttagaactttctctgtataagctgggttatttgtaaatagtccatccactttcaacttaagcattttggatgtgagtgctctttctttatcagcgttaaaaaacacatgtactttcatattgtttttgtggactaaatcaacaaaacctttaccaacaaattttgcattagggccaacaacattagaatatttttttatttcgtttagctttgatttgctcatcggcttaatgtcttcatctttcaaaagttgaacaagaggaacatcactgtttagcttatgtaacttctttagacttttgtcactaaatgactctaaaacaactttgttattagcgattagtttatttttagaaagtatgtcaattaactttttctccattactaattcgcctttgttgtttgttctagtctcgatgtagtagtttgtagtttgtccaaactttttaatgatttcttcaatcgctaagatcttttgtccttttccagtacgcagctttttaatctgatctaatgtaagatcttcaacttcccctttaccgtttgtggttcgatcaacagtcttgtcatggtttgcgactaggtgaccgtctttggtttgtcgtaaatcaatttcaatgtagtctgctttgtcttttattgctcgttcataggagagtagggtgtgttctggctcaatttccgaggcgcctctgtgtgcaatcattagcggctcgtattttttactgcttcctttcccatagcctaaagctgatgaatcaacttcgttaaatgaacatcctcctagtatgactaaagcaatagttaatgttatcaattttatttttttcatgatctaaaattatcataattaggtagttggttcaatatatttctttccaacaatttcttcgtactgttctggtgtaatttttccttttactacagcttgcgctactcgatattcatcccacacgccattaccgtcgttgtaataatcttttataagttcataccaattcatttaaagtacaccatccatcattagttgatatgttaagtcacttaattgttttttaaccttttcagcttccgatggctcggggtcaagtggttttaagctgtcaatgtattctttcgatgctgactcaatccatttttttgttttaggattgaatttgggaatataaagaccatcggatggagctattatagtgcaattatcaggaattggactatcgtcttcaagcacaacaggggattcataaatataattttcgtcatatttgtatacttgcatcataatattctccctacacggccttaaaactaaagccgaaactaatgtaatcattgggtttggaggtatttgtacaactttctataataactcttccttcagtatcaacaagcgttctgtgagtctgaggtattcctgacattcctgcttgggaagctacaccaacccattgaaacgctcttccaggcctgtatccttcaggcaaagtgaatgctgccactccaaaaccaatcgttccttttgctatagctccctctacaaaaacagcccccgttgcatcctttgtataccgagttttaaacactgtttggtctgttgagttaacatctgtgtaattaacccatccattctgtaaagtaggagtgtaccatgttattgaggaaagcttggtatcagtataggttttagctgagttgagtgcagcagtagctcgggtctgtgctccgtcggtcgtttcatgtgtttgccacgtagtccaagttaaatcgcttttcctaaatcggaaataagtatgtgttccgtaatatacttctaaagcaaattgggctactgtatcaccataattcatgacaactaaatagacattggacaagttagcaggggagtgaagaccctggttggcgattaaataaaacccggtggtaatcaaatcgttgtattcggttttttcggaactgtctttgtagattaccttcccatcatcggcggtgagtttgaagagttgagcagcgttccatttatcccgatcagatttgtcgatatggacattagtgtcattcagatgattatcaaagtcacttttagtagcttgttttacattgtctacattctcaagtccaacctgttcagcagtaaccttgtgtgggtttgattgatcgttagtatgttcagctaaaaaagacttcgtcctttcatcggagctgttccaataactgcgctcatcctttgtgatatgtcgatcgaggtctgcattgtgagcgtcaaaatcaaccttcgctgcttgctgtacattatcaaccttagccaagccaacttggcttttagtaactgaatgaggattttccttatcttctaaatgagcatcaaaagcaacttttgcggcttgctcttcattgattacatttgataatccgacttgttcttttgtgacttgatgtggattcgcattgttttgaatgtgcatttttaaatcgaaattctgcttctccatgaactcatcaactttgtcattcaagcgtttttcatgatcagacatgtgagattcagttctgaaaatttgatctttgagattattaatttgctcattgttttgtttgagctgacctacaaatttactactactcattaactcaccgcaattcctttaatcgttacatctccatttacggaaacaacctcaaccatgaatttgaaaagccctgcaatatcaaaatcccagatttcatttgtattcaatgtgcccgtacctaattgaaaatcagttttgtttgttccagcaatttctgtcttttcaccattttcatctacggcaaagaattttatttctcttgaagttgaggaaccagagatcttaacagtaatatcccgataatgtgatactacaaattcttcaccttcagacggggcagttgttgcttcgtggaatgtaaaggttgctttatctggaatggtttttaaaatattttcatcggtttctgtcaacaactccacctcctaaatctgtttaaaaactgacttttatttaaaaaggagaggggaagaatcccctcaaattatttagcctcaaatactcttacgtctctgtcagtaccgtcattaatcacatagacataaagtgttttaccagcagcgacaggaactgaaaaaggtttgtcacctgctgtcaatgggatacctgtatcagcagtcacagtagagtttccaatataaatcgtgccttctgcaggaggataaatagtaagtgctgttctgtcagtgatacctgcggtaactttttgagctgttgaagtaacagtgaatttatccgttttaaatgaggagaaaccgggatctctttcattcaaggtcacggaaggggattgtacttggatctctttgatagcatccaagccagcttgaggaaagtcaacttgtactggtttttcttgtgattttagatgaatgtcggtaattggtttaccagttccatcgtctcgagctgaagtgtaaatgtctccgtctttgtttaaaagtgccaagatatcaaactcctaacgttattttgtttcttgcgttgttccaatgtctacactgcttttcgatgccgcatcttcttgttccgttttaactccttttgtcccatctgggttacgcttaacacgtgcaaaagtaccgatcttgccattgtcatcagctaatgctcggtaaccaatttctggtgtgtaggcttgcccagcttctaaagacatgtctgcttcaccagagaaattaactttaggcaactggatatagagatcactgtaaattttcgatgtctttggatcgtactctagtgtgtgaatttcgaagtaatagttctcggagaatttttcaccactaatttcaactgtttctgcatcaacttcaatttgataatgagctgttacagcgttccctttagtagcaaacgtttcaggaacagtaattgttttgtctgaaacactaaattcttgttgatctccgtcttcatttgtaagtgagactttggataaaggagtatacgcgattttgaccgttccagaatcatctacaacaagactttcatcttcccatacagaaatcgtctcattttcaatttttacaccttgctgcattgccataaaatcaagatcaaagaaagcattttttacattacctgaaacttctttgcttgagttgatgacataaaggtctctatttccccatccaccttttaaaaagtcttgttggacttgttgcgagaactgagtcatttgcgttacagaagatgcaacgactttatggtcactaagccttttggttagcaccttaccaacttcatggataactgtttgttttgccaagtgttttcctcctaatttaaaatgaaaaagagactgaaagtcagtctccgaataattgctctaagtttttagcatctgctgtactgaggtggtgcttttcttctttatacatatcaacatgactattccagtcaccgattttcacatcagctgaaacagtggcaaataacgcagaagtgttataattcattatttcgcccattctgtaatatgacaggtacaattgataaattgtcatatcggctacctcttgatatgtatatccattaaaagcagccacacagctggcgatgtcctttaaatcattttgagaatcttgaagctttaattgattatttaaatcatgaaactcctgcaattcatcattctcaacaattttctcttcagtcaagcaatgcatctctaatatcaattttctaacattattaaatgctttctgatcaataagatgtagtgattctttgtccacaaatactttgctaaacactttaaaataagcttggttaaattcaggtaagtaatcatgaacaattttgaagaggctgttcttcttcaattcgataattaaatcatttaatgaaccatcattgttgatttttgaaaagtttctgatgatttccttcttgctcattttcatcatatttagctcgcttatgtactctgggtaatctcttaagtggataaagcttattgcaccgacttcagtattaataggccttcctaaaaagaaaaaatcctttaacacattcatttacttgctccgaaagtaaatatcaatttgtatcccaaatacccttcaggtgcgttcgatatgagcagtcttgtgtatttaacatttttaccgataccagcaaaattttgattgaagagcatgtcacaaacacgatccgtaattttcaggttcctgaattcagtctcttcataggtgttaatgtgtgtataaacatcaatcatcaaatcttgatctagcagcatcacactttgggttgagggtttagggattccattaccaagatagacacaaagcctgcaaattggttgatcggttaaatcatcagttttgggagcacgtttgattatggagtttaatatcgatggggaatcatcaactggatcataataattttccaatgtctgaacgtcagggagagaagaggagagagggtcatctttataatataaaagacgattcaattctgtatcattcataatagttctgaatacagttgtcatatgttcgaccatcatactcattcattatcacctccaactttctttttggctataagtctaattgttccggtgtctccatagaccttggaatagtctatatcatcaacacggaattcctcaccataaaaagaaagaaaaagacccttttttaatttttcatgttttaaaaaggggatggtgacatgtgcttgcccttcaggaatgtttatagccaattctgatcctattgttgaggttgtccgttctaaaacacatgggatgtcaaccttctcaccggggactttaatctttatcggtctccctgtaacttcatcgatctttccggaatcaattagtttgtcagaagatgttagactaattgatgaattacaaagccgcatagtagcactgtcattcattttgttatcggtagggcgtgaattaactaaccagtaactaccgtcatacaaaatcaagtcaccacgatttaataaacctaaaactgtaaggactttttttgtttcactgtcctgagtggtttgaattattacctgtgcaggcttgccattcaatttaatatcgtaagtttcaggtgaatttgctaagatttctttgaaaatttcatacttgtttgaattaaactcttcattttcccagccactcaaataatttgaagaagaggtaagataccaatctacagacaccgaaccacctcaatcaaaattatttacttttagtttgctcatttttttttcaatctcatcgacaagatcttcataggatctattaacctgagctttagtattagataaacctgtcaattgaatatctcttcctacaatgttgtttaattttaaggctctgtctcgatatcttcctaaataatctttgtacatgagtcttcctaaaatttgaatttgagcaggggagaggggttctttaaaatcttttgtttctttatcaaaacccagttcagttaaatctgtttcatattcaccaatagcgttcttgaaaaactgatactcaagtccatctggtaatatttcatttgactgaaactttgaatggaaaacgtttatgatttcatcataggtagtcaagatttaacccccttatgattgagtatcaaatttaaatccagtgtattcttcaatgaacttaatcttagcgtagtcattaatcttttcttttttagccacatcaaacagctgagctttttcagactcaagtaaaatttctttttgaacattttcttcgaaggctttttgtgttttataccccaagatttgtttaatccgttctacagtaacaacttcttgcttatcgtctttatcatcagtctcaaaacctaagtgtacacgggtttctttgtcatcaatatagattttggcatgagtaccttgaccgtcagttccagtgaatagcgaggtattgtcatagacttgggattgcacttctccagctgtaatctgtctaatcccattggctggcaatctgaagtctccgtgagtgtcaatctttcggaaatataaatcccatggacataggtttttaattgtgatctttttatctaaattaaaagacatgtaatccctccaaaaataaaaggagggacacagccctcctagattttaaattgtttaaatttgtggtaattcatattttgtgtctctgatgagaccaatttgatgttcttgtccttttgctacaccagccccaatttccatatcaaaacgagtaatctctgttccagtaataatgtcgttaccattcattgaagtaagtccgcctttttggaatacttgaagaggggattttttaccttgaggaacgaagaaaagaagtccttcaggaagatatgttttgaagttgtcgccggctttatttaattcagtaagattataagcgttaggtaattctacaacagaagaacctttataagtgttaagcaatcctgttcttcggatctcatccatcacagattgagggagcttagtgcttgaagcatctccggctacagcctgaaaccctgcaaagtcatttaactgagaaacaacagaaaagtcaccaacaatagaaggttgtccaaatcggcgaatctttgtgataatatcgtctacagatgatttggtgataccttcagtttcagcaaagtatttaacgcctgttgcatttttaattgcattgaacatttcatttacaacatagtacattgctttgttcatcatatctgtttgaacttgctccatgccttctgctactttatcgaggtttccactttgaatctcacgatagttaacagcatagccagaagaaatggtttgagttccaattggatattcgctccaagttgtagtagcgaacggtacgtcaccgcgggaagcttggaattggcttcggatggattcatgcgcgtatgttgtcatcattggttgctgatcatagccaatagttctaaatgtgcccataaaatcaaatagcttaattgctgaaataagcttaggctcaatggcataacgcacaattgtgttgatctcggctttagctacagggttgcccataagagctttggaagctagttccttcacatgggtcatagcagcattggcttttgctccaaacttggaaagatcttgacccgttgcagctgcagaaaagatttctacaataggggacttagcattcaatttagcatttgcataatggtttgagtctttttgaacattgtttaattcaactgtaaacattaataattacctccagaatattaattaagcctgtactgttaggtacaagccttttccgccaaatgtatttttctctaagacttttagagatactttaaactccgcaacgtcatcgccagctttaacccatttacctgttttgtccgcagcaggaaccaatacgtcatctttaacaagcgcatcataatcaactaccacgtctgagctgagttcaattggcagtccttttaagtctgctaaattaaatgcaaggacatattcaccttttaggactttgaagtcttctttattgcgaatttcaggtttatcaataatgtttccaaccacatatacatcaccttttgcagtagaagatgcgcctggagggaatgcgttaccagaagaatcgttagggattacggctagaccagggactaaatcgacactagccttgcagcgtggattatttcgtacttgtttgtaagcaccaattgttccaaatttgaacattgagtattcctcctaaattttataaaagtgttattttatcttaataaagatcatcaattgtcactgaaccttgttgcccagaatcacgaacgtctgaataaatatcgaaatttttgctattagtctcagaggcttgtttctttgagcgttcagcgatgaaggatcgggcgattgctgagttgatttcagaaataatttcgtttttaagctcgatagaaggggacttagagaacatttcaattttctcttttgcgacatccttttcttcaggagaatattcctttaaagcttggttaagctctccttgcatcttttcggctaccgccttgtttttgaattcctttagggaattaagctcttcatctgccttggctttttcatccttggctttttgcgcttctttttcttttgcttcagccttagctttttcatcctttgcagctttaacagcagcattcagttcttcagttttttgctttaagtcctcagtaagtttctcaactttttgatttaactctccaatttctttattcttattatcaagtttgttgtttaactcaaggactacttcttcttgagattttgacattaaattatcctcctttttgttactgtttaattcaagtaaaatggcagcgtcatctgcagggtcaatacctaaaattgcatcacctgtaaagtcaaatttcataggtatacgtccttgttctttccagccaccttcatattcaattgcatctgaaccttccacagctgctatctcaaccgaggtttcagggaaatcaccatcaaacatttttgattttaaccattgaacaaatttagggtagcgctggttgtataggaagccttcagctattaacactctttttggctcaccattaacatctatagtatcaatgtaagcattggtggtcgtaccaaccacagcgctgttttcaaagagcggggtaccgtccttgacttctgttaacccgtgtccgaatggctcactgttttcatcatccaagaactctgcgcaaattggcattaacttgattgattcaaggttagcgttgatgtatttctccagccaggtaatgccattcttgttaaactgagtattgttttcatgaatttcaagaacgacccacttgatgtatgtctgaccactggttttcttctgattgttaatttctaaaatcgtgcttttcaaatactaatcacctcctctcaagagccagaaggcgttccgttactgttatttgtcttcgatttaatcgtgttttcatttttcggatcgtcgatctcaggtgcgccggctgacttgtcgctattcttactcattgtgaaagaggtcgcatgaacagggaacttttcatcaaaaccttcgtctttttcatattccattagggataagtaagcatcaggattccatccagtcgcggatatccaagcaataaggctacctcgaccacttgtataaagatctttcatgttttggactttttctttcctgttaacgtgagtaagagggaggtaataaacctcaatataagagcgaggatctttgatgatattggcgtttatcaccttgttaaactcactttgaatttgttctaaccaggagaatatttgggaagaaaccatctcgatattggtttgttgagaagagtagttaccatcttgcccgttgagagcagaaccggcaaatcctaaatttgtagtaattcgcttaatgagctcgtcttcacctttaaccttcaagaaatccacattggtttctaacttgtctaattttgttcccgaagccaaggagaagaacttaacacctttaacgcttcctttagcaactaatgctttttttatattctcatgctgctgttcctgttgcttctgagataatgcagatttacctttttgatcaccttcagggaaagtctgataaattaaagtgctgttgagctcatctaaaatgttccgtttagtgtcaacaaagtattcatcataaaccatatcaataaatgcagataaaccgattgggcgtccccattgatcttcaatgtcgctgcttcctttaacagcaatggtcttattgttatcaagaactagccattttcgattttgatctttcttataagccctatagccttgtctaatttcttctggccatcgtctaagcttgagcgatcttccgttacttgtgaacttgtcaaaataggagacatcaaaagctaactgataagaggagtttttcctgcctataattttgcaataatcgagaggaagggggagaacggaacaattaaagtcgtcaatagcatttgattcagttattgatccgatctcattgtcacttagagtagtggggaaggaatcattcaccacagaatcaaaataataaaaaccagtgccatatttgctgagttttcctaatgcatccctgacagcacttttgtcgccgatttttcttaaagccaggttgaatctttgtttgttcgatttgaaactatccactttacttgatcccaaaataactctgtctaaagtaggaagggcaaccatgtagtcaataacgtttctatacacgccatttgcgttataaagcaatttagaggcatctctaatctgtttattatagacgttgtggtctttgagccatgatttaactttgtcgtaagaaatgccgttaaataaatcattgaaaaacaatgaatcaagcggtgctaaatttgtattaaattcatatgatgactgtggttcaggtgtagtcattattcacctcctcaatctctaattaaaaaagaatccaaatgaatactcatcatcggattcttccttttctaaaaataaagctatgtaatacagagcataagcaattgcactgtacctatccttatcaattctttttacaacttgctcaacagtgaaagaattctgtgtctttttaattcggaggtttgcaacttcatcaatgaacaattgagtttgaatacatgctgcttcaatcattacatcatcagatatgcttttttggttcttgatgtcatcataggacttaagcaacttcaattttccggactctacataatccaagaattgagtaataatgtcttggttaatgccttgggattttaggttataaacgatttccggcgaatttgggacatctggcttttgatcagtgtttattgtagcccagcacccaagttcttcattggtctccggatccgtaacatcctctaataaccggtcgattaaaccgccaccgactccgtttccatcgacaataacagctttaactcttgagagggaagtatcttgatttcctccatagtttttgaaaactctttttaccatgattgattgttctttaaaactcaatccgtttggcggctctatgatattgactacttgaacttgcctaatgaggttgttgctgtttctgataatcttcaaaacgacgatagctgttttattgtttgattcagctgcagagcgggctacgtcaaccccaattacatattcatgtagcaagaagttcttatttttatctctcggacaggaaagttcagggtgggtaattgtccgagctttgatcaatttactgatattaattaaagcaccgtcactggcaccaatccaatcacaaagatagttctgacggaatcgagttacattcccttgtcgtgctttattaataacagacattttttgacgaccaaagtgaataggaatgcgccaatctgatccgaatacaaaggatcctttaagatcaccggtttccttaaccattgtaaggattttttcatactcatctgagtttttatatcctgatgtagagaatcggttaatctgaccatttaattcagcgggatcaatttcgccagtcatggttgtgcgagggatattaaagatcggctcgatagcatcatcgtataaatctttatcaatcaaggcagattcttctaaggagccacgtcttctacgtaaacccttagaggattgagcgtttgccaggttatcgataattgccccgttttgaaattcgactcgaccactgtcttttgaaaagttttcactcttgatttcatctttaatggaagggtaaaaccttaaaatttcctcgtgtttttctttccatatttttaccgccgattcctttgtggaagcggtaatggctaatgttacattagggaagcaaatagctgtatggtaagcaaccatgatctgggtaagcgtttttgatccgccacgtggaatgcagaagtagttctgagggaagcgactgagggttctcatcataactctttggtataaatccaactcaattccgccgacttcaggtttcaacatatcgtaaaaaatgtctggataaaaacgaataaatgaggtgaactcagcccacttggagatattctttccaatgaggtttgaattgtcatctggattcagaggagtttcaaaagctgcgtcgtaaatatctgttctgttttttgtgtgcttcttgttttttgaggtaaagtttttataactagccattactcttcatcacctgtgtcataaagaggttctttgtacacattctctaaatctctgaacacattgttacgagcactcttcagtttatcaatttcttcaggcgacaatccttttgatttgaagtcctcttcgagcatttcatcataaaagtggtaaatgtccttgtaatcgactttttccttatcttcaagccttctgtaataatttataatcgcccaaatgattagatcagcgtcatcatatggttgagctgctaaacgagggagaagggggataatgcccaattctgtttcaacggcttcaaataattgagaaagtacatcgacaccaccactgatatcgctcttacttaactgagatacattaatttttgcatctgtagctgcttttgaagctaatgaaccccattctttagcttcttttacatcacctttagcagttgctaattcctcttttacacgaaaacgaatatatgaaagcaagccttcggtatgaagtgtggttttttctccgtaatttcgaataagtttattgtattttctttcaaactgacggtactcatcaggggtgtaaccaattccccatttatcaatcaggtcatctgagatttcaggtgggctagcaccagaattgtttgtaggcgtagattcctctataagtggattctctggttgtctttcaaaaacactgtctttataaccagtaccgttaaattgcttcaatgaattagccattgtcatataagcgctaaatgtatctgtttttctcttttcagcttgttcccaatacaacggatcaaatttaacatcaatctgttgtaagactgtatatattgattcaatattgttgtaatcaatgtttttcttcaagcaagtcttgcaaatagggacttttcctgttttctcatacaggctgcttcgtgaattgtagaaccccgactctttgtccttttctttttgacaagcagcacaaatcaatttttccttttctttggcttttcttggcattggttcacctccgtattattgttcaaaaacacgttttataaaacgcccagcaatagagaggggacaaggcttcctcaatcatcactaggcgttctaaaaaagtattttatttataagttaaggtaccatttttggacaaaacaaccttggttccttttaatatatcagcaagagcatcaagcaaaccttttccaataccgtttgcatcaattattaatttactcggtcgtttgtctataatcatggcttttatttgactagcctgatgtttaaacgttccatgctccactttcttagagatgtcctcaatacgggaattatttaaatcaataattaaaaaggttgtttcttctcttccaggattaattacagcaattctttcaggattatggcccgcactcaatgtgtaactcgttccgtttaagggtttagtagagaatttgacgtcttggttcaattgttcacttttagtggctttctcaaatcccaggcttttatgcaaacttgctagggcgtcttttaattccctgttacacagataaccactatcattaatttcttttagtagctttacatattcccaaagaactttagtttcttctttcaatcatcctcatcctcatctctataaaattaaagttttattaaaaaaaggttaatgattaatatacagatttaaaaatccgtaattagatgttgacacctgatttaaggttaacttatactaattgtgtattacaatatagaaggggagatcgttttatggaaaacaaagttacattatcagatgttgtacgtgaaaatattccagtggttttaaaggattcaaaacaccctcttacagaaaaagagcttcttgaagaactagcaaaaaagatacctgaactagttaagaatggtgagtatagaaatggtgttcttcgaggtgtattgaataaattatctacacagccagtcgatcgattaggaatttcacgtgaaggtaatcgagttaagtattatttcattacagataaaaaaactgagcttcaaaatgttattagaaatctcatcagcgagattaaagaaaaggaattattgacagttgattacttaaatgattcgcctgagacaattgactttttaaaagatgtatctactcacattaaagacttagaggaatttacaagataaaactattaaagaaggctactattaggccttctttaatttaatatgtaatcatactgaatagtccggccttttccagactcataaattgataagtttgctccagcttttgcacctgtcattaggctgtcactgtattcatcggaacccataacagaagggagttgtattacttggacattgtgagtggctgcctcacctacagtgagcatatttccgtggtggaagtgggagatgtacatataatcgtagaattttcgtttcatctgtgaaatgtcacgaatagcattctttttgtttttaatctggtgtccatgacaagcaatgatttcaaattcaagtaatttaaaatccacaattccttcatcttgaagaagtgtctcaattcgctcattgcctttgagcatgtcgtgaatatacgttgcaatgatacgctcaacatcttctttaggcatttctgagcggcttgtgttatgcaatcgtaactctgtatgattcgcagaggggatatgtatgtatttgattttaacgtgcttagaaagctctctgagccattcaactttatacctagagtatttaatcacttggtcaataaaaccatactgaagggctgttaattgtgatacacgcaatgccataccttcaacactgtctgcgccattcaatacaactagctcgtccaagttttctttttttatgtgctcaacagtttcagaaagaatctgattcatccgctgcaaataaatctgttcgttgtattcattattacagcttttaaattgcttcccaaaatgttcatcaccaaatccaagaacagcagccctttttctttcgtttcttttcaatggatagaaggaaggaggagggggagtacctactttctcgatggcctcagttacattttcataaataagctctgttctgctcttaacactagttttcttatgtatttcatgctttacagcttggagcttttttctctcttccataatttcaacctttttcatttccatttcaataagggaggagttggactctgcagatttctctttctggtattcaacaccttcgatgaagttgttaaaccactttctatatgcagattctcccttagattcaccggtctctttattgatcaaatctttgatttcttcccaattaagattatagatgtctttattagagcaaattctaattttccattctttaagattttcatctgagtggcgctttgtttgaataggatcgatcattcagtcaccacctactcagaaagtccttcagtttcttggggaacaacatcactgtcactttttaacgtgaaatcaattagctccgttttgctttccatctctcttaaatacttagataatgagtgaatttgtatgccatcacctttatgctcaataatttgatcttcatcaacatttacagtacattttttaaaagaatactctttcttgcctttagccaaattaaattcctccaatatgtgttttatttacgttcaataagctccttcggaagcccgatgatccgaagcatcggtaacgtccgaaaaggggatataaaggagatgaaagataagtcggataggcgttggggaaacgcccgaaggagactattgataacttagtacgactagatgtaaacacgttccagtagatcacttgtaaaaaaatactagatatatagtggtttatgtagtaatatgtctatgtaacaaaaatacacaaggaacagtacatgcttcaacctttttggggaggggaaggtacgaggtctgtctgtccaggcgctcaacagttgtgatcttggacaggcggacttctactggactcgcgatccggtataccgccggtaaaggaggtgccactgcatgttgttttctgtccttgttgatgcaagaccagcgtgtccggaatgcggaacgtacagtaaagacggtaattctgttaatgctgatacgtgttcattctgcaaagaaatgaacgcataaaaagatgcgctgtgctggtggcgatagcgaagaggtcacacccgttcccatgccgaacacggaagttaagctcttcagcgccgatggtagtcgggggtttccccctgtgagagtaggacgccgccagcccaaatcctcttcgtggttgacaattagacaacaaaattgtatagtaaaattaacaaggatagaaaacagcatgctgtaacaaaaaaggtttttctggagtcgcgaccagaagagccttttttgctttttcaataaacttatgaattgaaataaatattggagtagctggctttagaaggaatcccaaagctggacgtatcgaggtattttttgtatctcccacgcgggattaaacggctactctcgtttaatgaattcaaaaacaaattacgagaaggaaagacccattataagccttctcaatagcattttcagtctctcttgtcaggttacacgccttattgagaaacaaagcgtctcaaacgctcgccatttattttgcacagttttctctgacccgtgtaaggtggtatgtgcatgggaataagcctccattcagaacattgaaggagatgaagtgaaatgggagcggtgatcaagcgcccaacaaccatttcacttattttacgagtatagaagactcgcaaacccggaaaatgtttatgtgaccgcataataagcatcaaagcttacaagggcattatttaaagggaagggagacgcatctgccttacctaagtgcaagctgaagcaatacaccgcaattaatattcaggctatatgccactcataataagaccctgatgggattcagtcgcaatttgcaataatgcgttaagtcttatcggcatatttagcccgataatagccatttacctgtctcttttagatacagacatccgagttaacctcgaaccctcataaatgaccattatccgactaaccacaatgaccagttgtagctgtaaagtcgaatttaatgcttttattcgtatgaaagtgagaatagacatatttagaaaaagcttaacccacggtggggcaataccccgctaatatccacttatccgaaaccctggcattccaagtcctcaaacaaatgaatattagccgagaactgatatcccacatatcagtaaacagctttttattgacgacacccccatgtcatcaataaaagaactctaattaattaacctggagataaatgcggaagaggatttgcacctctcatgaacggatttcaacaaccgttagccaaatcgactattatgtagctccgtagtctacttcacagtaccgtccttatgttcgtctaagcgtctacctattccgccaccacattcataggttaaagagggagagataccaatccttcattttatatattaagctttcactgcgtcttttagagctttagcagccttaaatgcaggtgcctttgtagccggaatatcaatttcctcacccgattgtggatttctccctttacgagctgcacgttcacgaacttcaaacgttccaactcctggaatcttgattgattcaccttttgtaagtgtttcaacgatcacattaaatactgcttctactttaggcgcagcttctttcttagtaactcctaatttttctgcaacttctccaacaaattctgttttgttcatgttttaattcctcctagtgatattgtttatttttgtgttaaagtataattacggtaacgtttatgcttctttgaaaaacgggagacgtactcacccttatatgtggaaattagctttctttctcccttatggcgattatctcaaaaggggctttcagaccagtcatatcaagggttcaaggcgcttttttcgttaaactttttccggtaaaatcgctgtaccccttgggggagtaaggctcagggcactttctattctaggacattctttgttttcttttgctattcctccaagaggttctgagtttttccttagagcatttgtcacataacttctttttatttgatttggttttatatagtttattgcatgataaacaaattttggttgattttaaattgacttctaggtttttaagaatgttttcaccgaaacactcccacaaagttgccttaaacttactctttttcttgtataggtgcttaactaaaacatcagtaacatattgctcgtcttgatgaatcttcaataacctgtctttaatgaccttatagacataaagtttttgtccaggcttgatgtcttcatcattcatgagccatttcttgttttggtctaatcgtttgtattcacgaataattgcatcgtccaacttaatctccttgttcttgagcaggaaacgataatcaaattttcctgctactgctgcgaaattaattcggtcagaagggataatggagtctaacttatttactgtgctttcattaattaactcaacgctatgttcttctttatcctttgcattgatgaagaagtggggtactttattttttatgtaatctttaattttttcatcaacatgatcaggacgggtgggcatgaataaggtttttgcgaactttgataccctcggtttcccgatattttattagggaatagaccatatcatcatctgtgctagacagatggtcagcgcttcataataaggaatttcaccttattattactccataaaggatggtcgttgcaccttcatttacaagtgcttcccagcatgatgtaaacgcttggcacagggttttcatataatacattctacattcattttacatttttataggttcttccttgtttaattccatagacaacattgggttttatgttacacatttttgcaacatggggtgctgataacccttttttaagaagttctcttatgcgaaatacttcttttggagtaagagtgcttttcttcttgcttttgtatttaagaataaagtcgtcccacccagtaacatgaatatgattccatactttacactctaatattgatttaacgatggggtaggaaacacacattgactttgatacttcggacatcttttctccattaatcaaacgaacttttatctcgtatgctttcgtttcatttatttttgaggatttattttttgaccctaaatgagactgacgcatctttaatctagattctggcgaatgccttttattcattctagattgtaaaagcttttccttatgctgcggagagagctttctgccaattctcgctttactcattttggctttagtctcatcactaagctttcttccggtgttattaatcctattcttttccccaataattcttttggtggagtcagacatcttacaattactcttgccctctccgccggtggtcatgttaaagccatttaaataggcacctagttcatttatgtagtgagtttctaattcgttcatatctgagtttggatcaactgtttgcaatacatgaaattggaaatcgttttctccatatttattccaggtattctgcaaatgtcgattacagtgcgaattgtttttcagcttccaagtgtgatgccagtaacgcttaataaatttcatcttagttttccccacatatattaagccggtgcttatctgctcaatcttatatatcccactcaaatatttatgctcatcctcatttataaacttcactttgtcacccccttgttttaaatatcattgttcaaaaatgtaaaatgtattaattagaattcccctgttagcacactcattgacgatcatttcctatcgctacttttcgctgaatgtacaccctagatttctaggttcactgacttttcatccgcatatcgctatgcgacgcgactataaatttaatcgatagtaaagttattttccatgcataaccatttgatcacatccagatttatattgtcgctgttccatatcttagtgatgttgttgctgtattccccgatattgatcccataagcaagagttagtgcttcatatatgttcctgctattaatctcttgtttttgtgctactgacatttcataatacaaaggaacgatgttctccatattacgcttggcaatattgacgattaactcatcagaaataattaaggccttatccccgtcattgtcaaactgcagcaacttagatatcggatcatgaatgcttgtgtaaacacctggggtaataaaccacttttcatattcctcatcttttttgttccacctaacaccatgctctctgaataggtgaggggagcggaggatgtcaatatacccttcatcatataaagaacaatggacatcatttcctgaaagtagtccttttggattctggatattcagaaataacttttcgcagaaagcatacagatcaggacataaatatgtataacgagcaccatccacaagcaattttcctgatttggcatctttaatcatgcttttctttttatttttaataatttctttcgtgtgatcatcgttaagaagttctggatatagaagtaaagcgtcctgaagagctgtccgatgtttctttttctccgtagctccaagaactcttaacatggtctctttatcagttcccaatgtggttatctcttttacagtctttgagctcatctgaattaattcttcatctgagatatctgtaagtgtctgaagcatttgataagtgagtttaccttcaacagaagggtcttcttcgttgagtttagcctctaagcatccatattttttgtaattgccttgatattcttcccacgatgaataatacttccacattttaaactgacttttagtgaagataatttgaacatcatctttcactacgtcccattccttgccgtatatatcagttactttaaaagctttgttttcctcagcaaatttacgaaaatcaaaagggactaataaaccctttacccacgggagccttaccatgaagcttttacgacttagagtggggagtatcattccgcagccatctgtatgctcaatgggaatgttcattgtttttcgtgtgatttcgtaggtgtctcggtcaatatagtcaacaaggcttgatacatccgtttctaggtcgttgacaacaattgctttatcaatatcgatctcccaagggctactggcgctgtttgatagggccatatagctattccatttgttaatgctgctccctccaagggaattaatcttttcaatgctcaagccacaggtcaaagcatcctgatacttgtcgtaggtgctttttttaatgaaacatgatttctttgtgcgaatttgaccggcgctactcgtgaaataaacgtatttttcattgttatgtaaaaatccttgatcaataatgtctttcaatacctcaaaatgataagtctggacaaccatgatttcctcagaaagggtgttttctttaatcccgagggttcgagttaacactgaatcaaataatgaaatcactttgttgtctcttaaactgtcagttcgaagtgttcttatgtcattatgttcatcgaatgcggaatagaggcattctttaaggtatgtaattctttgcgaaatgtatttcttatgtctattatgtacactatctaatgtcttaagataatctctgtatctataagacttcaaaatcctattatgtaatgaattttctttgtcattataaaatgctgatgtgtccacactgtatatgtgaacttgcttagacaatccatccttttttcttttcaaccaatcccctccgtatattttatttttactctaaaagtgcttaatattcgctattaagatattgatttactaaacttcgatatgtaaagctttgttttttaatctttccgtaccatttgtaatcctgataaaggtgttcttcttcgggtgttgctgtcccatcgactacttttccctcaataaaccccattaaatgactaaataaatactgctttttcatcttacacctccatactattttatttttattcttaaaatgattaaaataaagaccacttcatgtggttgtgtttttattatatattttatttttactcttgtaaacataaaaatccaaagttaattggatttaatttcgattaattcaaaaagatcgtcaactttacaatttagaatatgtgccatcaataaaagattgtatgtactagggaggacggttgcaaatccctcgctgtcatttttacaccatctagatatacttgctctttcagcttttatttgctctgctaaccagcctttttcgatacctttgctgcttagaaatgaatccaacttacttttaaccctatattccatttaaatcatccttttgctgtttgaataaattttataaaatgactggtttacatacaagcagagtgtagttatttgcattaagatacaaaaatatttgcatttaaatacaaataaacaatataataatcgtagatcaaccaagatacttcaaaatcacaagatattaaggaggggtcacatggatacttattttgattcagtaattgacaacttaactcgaaatgatttgtatattctaggcttattgagcgatgaaggggctgatttaaagtttaaatcaattaggaagaaaaccattcaagcaaaaactcagttaactgatgctacctttagaaagagcatagatcgtttagaggccttgcagtttattaatatagttaaaaacagtaaagagcatacagtttttattactcaatatggacaagaagctttgagatatcaattagaaggggagagggtttaatgtttggctttattggaattgggcaggccggtggaagtgtagcagatgaagcgatgaagagaggatttcattctgtcgcaataaattattcactttcagaccttaattcattgatcaatattcaagataagcttcatctggtagggacagaaggagtaggtaaagacagaaacgtagcagcgaaacatatgaaaaataactgggagtcctctattgagtttataaagaacacaatggaaaaaccttcagtacaagttatttttgttgttttctctgcagctggtggaaccggttcaggggtagctcctatattattagaattgttaaacgaataccttgctcataaaaccatagtcgctgttccaatccttcctgacaacaatgaggtactggttaaccagatgaattcactggagctacttgaagacttatctatgccagagacatgtgttttacctttggataatcaaatggttttgagtaaacatgaaggaaacatctctgagagtaggctttacaaggagacaaacaagctgttcctggatttaattgaagtcttacttaattacacggacagaggatccaagatcagcacactagacaggaaggatttaaatcagctttttgatacgccaggaatcatgactattgcccaaacaaacctcaatgaatttacaaatgagggcaagtattttgataagctgcatgaagatatacagaagtcgtggaacaattcgatatttactcctgttgagtttacaaatgtgatgagagctggagttatcctagatgttcatgagttcttaacggagcatatatcgtataatgagctgtttaatgtctttgataacaagatgcctttagacttatttaaggggcattatgataaaggtaatagggcgataacgattcttagcgggttaacctggatcaatgaacggatgaagcagttagatgatttaattgaaaatggaaacactgaagttaaagaaacaactgtttataaagcgaagaatcgccgtagaaaggatttattcaagccgaggaagctagagaacaaggaatcgaaaaagacctcgtatatggaggcactgaagagactaaagcgctaattttaaagggaagctgcctactaaggtggctttttattttgattttttatgaccccccttagtgatcgtgagctaaaaaagtgcgtatcgtgaatgaagatcggaaagggttaattagttgatatagcaatgttttagagctgtcaaaggggataataggtgttttgtgatcgtaaaacgtagacaggagagaggaaaagtggacgttgagttaaaaatttgatgaaaaagggaagaatgaggggtagaaaaacattgatactataggcttttacgatagcgattacgatgtgaaaataggctgaaaaatgggaaagtgaaaaaataagttgggtgtggaaatggaagtgctaggggtacatttgttcctgttttttagcctttagatgttaatataccccctatatattggtattgaattccctatataagatacgttatgtagggtttttatgatttggctgataaatttagacttctaacacaatttcaaatgaaaaacaatatttatttttgaaaaaataataaagcggtcaatttaaaagtgaatacccattcattaaaaataatcgtgtgtataacgaaggggaatgaatcgaagtgttatctatcctatataattttcatctaatccacacacacctattttatattcactttaatcatattccttcatctcgttacatccaccattacatatcctcatcttgcctaatcatctccatccaattccttcaccacacatcatcatatatccatcccataacacactaacaacaccatcagaagcattctaatacacctataatcaattttaatttaatcatagtatcattggtatccaatccacatacacgccttatacagcctataaacacccataaataatagtccaaaataattgaaaaaaatccatatttagagtaaaaataaaatgaatttgtaggggaaatgtgatataatagagttataggaaaggaggtgaaaagagtgcttgagaaagtgggtataacaattgctttccttattcctatcacggttttaatcatcaactgtttaacgatagctgagaagattcaaaacctgatgaagaataagaaaagcaaaaagaaaaagcgtacacgcaagcgtctccgaccagagagacaacgcaaacgtatacgccgataaacctctaaaggggattaagttcccctttagttactacccatattataacatggacaagcacattgtaaatatgaaacgattctcattatggtttacgaacataacatttattgttttattcttattgttcctcttcatcaaagattacttcagcagcggaacacagtcgcttattacaggtatcttcatagtaacgtgtatcatcatcattttattatggatcgcttactttgtatacgccaaaagaaggtaaacaaatctagctaacatcatgctatactaagcgtattagaggtgagcggaatggaaaagatacttgaagcaatacagcaactttccagggatattaacacaattaagcaggacgttaaggatattaaagaaacggttaaacgaatcgaagaaaatgagcctgaagaggttgtatccatgcttaagattattaacaagaatattgaaagtgaccaccgatacaatgataagaaattttctggacttgaaagacgtattcatgatcttgaagaaagaatcaacaattgaatttcatatatgagaaggagcggtaaaatatttatccgttcctttatttttaatattaaagggggaagtctatatttattatgaataaaattaaaataattgattctataatgggatcaggtaagacaagttacatgatacaaaaaatgaatgaagcacctacagacgataagtttatttttattacaccttatcttgatgaggtaaagaggatcaaggaagcgtgtccagataagaagtttattgaacctaagatacacagcgtaaacggagaaacattttataaactggattcgttacataagcacctttcagataataagaatatagcaactacacacgcactctttaagatggcaaatgagacaacaaaagaactcatctattcaggtaattatactttgatactagacgaggcaatagaggttgtaaagcagttaaacatatctgcagatgacctggatatgttatttaaaaataactggataataaataaagacgatcgaataatctggaacatggaacaagaaaagaatatgcaaagggaatatgatggagagtttaaacacttgaaacagcttgcattaaataacaacttaatattacataatgattcagtcatactttggaacttccctgctgacatattcaaattgtttaaagaggtatacaacttaacatatctgttcgatggacagttgcagaagtattattatgatttaaacaatattccttatgagaaatatatgattaaaaaagataagggaaaatataagtgtgtgccttatgattcagcagccgataagcacattaagaataaaattaaaatcaatataaatgtatatgatggtgatcttaataaaatcggtgaagaaaagtactctttatcaaaaggatggtacagaaataaaagggttttacataaacgactgcagaataatatcctgaattactttcagaacatatgtaagtctaaatcaaactttaatatgtggacaacgtttattgattataaaccaaggctttcaggcaagggatatactaagggattcataccatgtaatatccggtctacaaatgaacatagtcataaaaatacactagtttatgctattaatcgttattgtaatcccttattagttgaatactttagctctaagggtattaaagttgatgagacttattttgccctttcagagatgattcaatggatatggagaagcagcataagaaataatgattcgatttcaatttatattccatcaagaagaatgagattaatgttaattgattggttaaataatgatttataatccttattgcaaataaagcaataaatcacaaaaaaaagtcaactgtcccaagggtttgaagggtgtgtcccttaaaggggaagaggggtaataattaaataaaaaataataaattcgtccgtaaagaaagtgcctttacggccgtctcgtttcagcaagctgaacctcgataatatgtttttcttttttagaataaaaataaaataactattgaatatttaaagtgatcatgttaaaattaaatcaagtcaaaggattacatacatttagaataaaaataaaattattataaagaatggagaggttgaaaatgacagctgttttaagaattaacgaagagttaaacgggattgaactttattttgatagtaaaccagaacaagaggttttaactcatcttaaatcaaacggttttcgatactctggattcaaaaaatgttggtggagcaaacggacagaaaaatcaatgcaggtcgctaatggtgtcactaaacaagaaatctcatcttctaaaacaatcacaaaaaccaaaaagaaagctaagggtgtaaatatgagtctgtgggatgcaacacaatggagtgaattagaagtaaataaggaacaagaagtaaaagaaatggcaaaggaaataagaaagcatataagacaacgtttcccacaatgcaaattctctgttactactgggggaagctatttacatagcactattaacatcaaaatcaaagcaagcccttatgaaaaaggctcaacttatttgactgcgatttatgattattgcaacagtcttttaaacaattatcgccattgctacagcccagcagatccatacactgattacgcaggcagttacaatttctatggtcgtgtttcattagattgggaatacacagtgacagaacaaacagaagaaattaaagaagatatgacactgtttgattcaaagatggaagaattcgaaagagccgagaaagcgagaaaagaaaaagaacttcaggaatatttaaaagagcaagagctcaaaaatgctgaatacaagagacagcaacaagaagaaaagaagcaagtcgaaaatatctatagcagcattgtagtaaaacaactgaatgaagatcaggagtattttgttattgatgcacagtttgccaacttaaacaaaaatcaaacacttgatcaatacaaagacgaggttgctaaaggtgactacagacttgaaaatgtgaaaattacaaaagaagtacatttcaatactgaagaagctttaaacaacttttctaacttgcttttaaatgattttgattttcttgcggaaaccggtggaagttttacggaagacaacagaatcaactcaatgattgattattacaatatggacgatcttgaaaagaacacagtcaaatggaatttatatggcgtaggagtgtactatgatgggaaattgcaatttattatagacgctcaaggccattcttatgcgagatatgttggcttagtggataatgccaaaattgaaaagtcaatttctcataagcaagcgttaaaagaagaattgcaggagttaaaatatcaagcgagaaaaatagaagatctttctagctcagtcattgaagaattaaatatatttgcaacctggaacaatgaagactgggacaaatataaaacttcactcaaagaaaaattgaaattgaataatttaaatttaagtaaaaatgttatccaacaagcagatgcagaaaaattaaaaactgctttatacagaattctccatgaagttgacagtattcaagaacaatttaaaaatgctgatcttgaaaaaggtgaaaaatatactctgtttcacatatctgatcttggatctttaattactgaaagaataacatatgacagttaccggccaactaaatatgcccaatatgataatgcagtcaagttgacataccggcctgaaagtaaaagaaaattatattttcgtcacttctattcagaattattgatgttcaaagggtggcactcgctgcccgaaacagtattgaataatgtagaggttaaaccagatggaatgaaaataattcatagtaagtaccactcttgcgacaaaagacaattcgatgaggttttaggttatttaaataaaaaaagcttcaaaccaataatcaacacttataagcctaatctataaactaatgaggggatgggaaaacatctcattccctaaaaaggggagctcaaaatgtttaaagataatccggatttttatccgacaccaccacagttaatccgaaaaatgacatctaaagtagaatggaagtacattaactccgttctggagccctcagcaggcaaaggaaacttagtagaagccatttacactcaatttaaaaatactaggaactatagaaggaatacgaaatatgatgtggatacaattgaacaagatgaaaccttacggcacatccttaaggggaaaagttatagagtgatagcagacgattttctgacctttaacacatacaagaggtacgatttgatttttatgaatccaccttttagcaacggtgctaaacacttattaaaggcgattgagttaattgagaagcaacaaagatccggccagattgtttgcttattgaacgccgaaacattaaaaaatccgtattcaaatgacagaaaatttctcatacgtaaactagaagaaataaatgcagaagtcgaatacattcataacggtttccagggttcagagcgaagcacagaagttgaaacggcactaatatacatatgcattgaaaagcaagaatataacagcgttctaatagaagaattgaaaaaagatgagtttcatagaattaatgaggattataaagcaacacagttggtgaatgcagactttataaaagggattgtagaacaattcaattatgaaatcaaagcgggtttaaaattaatcaatgaatacaacagtttgaaaccattaatgctgcatagtttcaatgatgacagtactccaatattgaagctgcaaattgataagaataccgaagaaaatgacatagagaatgcatatataaaacaaattagggcgaagtattggaatacgttatttaacaatgatcaatttatggggctcttcacaagcaatctgaaacaaaagtatttgcagcacgttgaggaattaaaagattatgatttttctttgttcaatatctatacattaagaattcagatgagtaaagagatgacgcagggcgtagaagatacaatacttaacctttttgaagaatttagccacaagcattactatgatgaatcatcaaaaaatgtgcacttatataatgggtggaaaacaaataaatcatataaaattaataaaaaaataattattccattgaacgtgtatagctggctagatggtcggtataatccaacagactataaggtcttagaaaagttgaaagatatcgaaaaagttttcaattatcttgacaatggattgacagaagacataaatattgttgaaactttaaatttagctgagcattatggggagacgaaaaaaatagagttaaagttcttctatgtaactttttataaaaaagggacatgtcacatcgagttcaaagatatggaaattctaaagaaatttaatatctttggcagccaaaagaaaaactggcttcctccttcgtatggcaaggtaaaatatcaggatatgacggcagaagaaaaagacgtaattaatgattttgagggtgcgcaatcttacagtgaaacggtaaataacgcttcttattatatcctggatacatcgaagcttctcatgcttacatcataataaaatacgcacttttagaataaaaataaaattagtattgattatttaaaatggtcatgctatacttaaatcaagttaaaacaacagcggagcatgcatatttcaaggatgaaaataaaataaaatgcatattttaaacagaatggagagaattaatttggataaaagtcaattaataaaggttggctcaacagtatatcttaaaccaatcaataatgccgcacgatatggaagaaaagatattctagagaaagttgtgttaaaaaagggaaggaaatatttctatgttggaaatacgggagagacagaaacaagacgcatgttcaaattttctttggaagatatgagagaagtgacagaatatagtcctgactgggagctttatttatcaaaacaagagattattgataaggaagagaagaaaaagttaatgtttgatatacgatcggtctttgataggtggtcgacggctgatttaactctggatcaattaagaagggtgcatgaaattatttctgaataaaacaacaattttaaacatataggagggtgctgtgatgaaagaaggaacaatcgatttatgggatagaaaagacggaaaagttaaagtgatcataactgatttattgaaattgcatccgtacacaggaaaaggaaatagatcgactgtaagtctatttgattttgacggaaattatagatgccgtatagaccatatacagagtgataagaatctagttggagatatactcgaagcgttagaggtcgacgacagattcaaaaatttcaaactagcattcgataaggacattaaaatgtacgaattttcgataaatgaacatgggaacatgccgtataggtcatacaatacaaacagtgtgacggcagttatcaatacaactttcgatgcattaatcagtatgagatacatgccaaataacggagggtacgcagtgacaaaagataacgagaaatattgagattggaacaatttcaagaactggtcaggctaaggatatgaaagacttagattgttcggtcttacatagtatcgacaacatctttaaatatcataaaatcagataggacgggcgtgtgtagtttggatagagagaaaatcaatgtctataaatcagaagaaaacgattattgcgatggatgtggacacagaagaataaagggcgtatacagcgtatacgtgccgtatgcaagaagtattgtaaatgtatgtgatgattgtaaagaaaagcttgtgaatgcattgaaatcggaataaaacaatatttcacaggggcttgttagccaatactaaagcgaagaggtgagagagctcaatgaatttaaaagttgatgacaaagtaaagccaattaacaagactgctggacaccgtgattttgataatagtgctactcactattcgatgttggaaataaagcaaaactttttatatgtaatcggagtcaatgaagaagaatctagaaaagttaaggaaatttgctattggtgtggggtgtatccaggtgcaccgatggatataaaaaaagattgaataaaacaaacagcggtttcatgacattccaaataagcaaatacctgccaaaaaacatttgactatttaaagtagtcaatatataataaaagtatagaaaaaattgaaatgagggaacgagaaatgaaaacattagttcatcaaattaaagaaatcagcaacaatcaaaaagaagagattaacggatacacaatctttaaaagaaaccaaaatatttgtacagtatctaaattcggcgaagtgatgttcgaagggaccctaatagaagtttcagagtatataacaaagaatagacaggacactttaaatagtttttctcaaaatgaaatagagactctagcagaagcaatgggaaaagataagagaacgattttgtttgatatagaagatagtcgagttacagccgaattataccgtgaaagacttgcccgtgttatctagctcctcagggggagaataaaccgcattaagccctgagcgttcctgcttatgcaggaggttgttagtatttttaaattcttgaatgggagatggaataattatgacaactttaaatgaaaacgtccttcaatttttactggataatggctttaaattaaaagagtacgaagatcaggggttaacattttattcaaaagaaataaaagatagtcaagctttaaaaaaattgattgagtatcattatgagatcgaagaagatgaagatattgtagaaggcgataccacctttattatggagattcaaacaaatggtgagaatccacaatggctttttacaggcgaacatgacatgttcgacattcttgacgatcaagacgacttttttgattatgtaaaagggattgaacgattaattaggccaactgagtagctaaagagaggggaaatacaatagccatgaaggttaaacaattgattgattcattgcaagagttgatagacaaaggggaaataacagaggaaacacaagttctactcaatacatatgacgactgcatgtacgaagtagcatgtgctgagccactgggagagtttgtacaaatagaagctaagattaaataaagaaataaaacatgtatttaaagaaaggtgattaacatgaagagatggattaaatttgactacgatgatggagcggaagtttcttataagataaacaaccctgatcccaatggagagattactattgattttaaggtgaaacagtcagaagaagatgttaaagagtttcagctatacgatgatgaattagagcaagtatacaatcaattacaagaaatgaaaaaagggttgtaatgggatatagcaaagattttgcaatcaatcttgcaaatgagagagcaaacaaacttgggtttaagcattatgtcattcataatcctaaagattatagagaaatttttaataatacaggctttgttgtggcacagacggtaaaagaaaatgaaaagtcatctattgtttacgaaacagaatgaaaaggggagataaaatggatgagctgctaatcaagtgtgaagaatgcgggtataaatggaatggcgatgactttgatgaagactgtccatcatgtgaaagcgaaaatatcaaagttattggatgaaacgttagtattccaaagcctattttaaataaaaacaccattttaacttgaatgtaattaataaataggcagccattattaatttagctacactagcataaggtatcaaaataatggggtgatgaggacaaatgttcaaagtttatttaggaaacgaaaactgcactgcttgtggcaagaagcataaaaaagtgtttgaaattgatggaaagccttatggatctacctgtgcaaaaagattgtttgatattgatctaagtgctcctgcatggctttatgaattagcagaaaactgggtgaaagtagattctggatacaccaaagacaattatgattgttgcactctaaatttctttaaccatcatggtttagagaaaggaggaaagatagaggataagtttggagagtcgctactgtggaataaacccgtcaaaataaaaggctattcaattaaggtagagtggcagtatgaaataaatgattacatattgagaaggtatagagagctatatttttaaatatcctataagggggagaggctgtctaagtaaaacagcctttaacttgcttttattgttttattgctcaaattgttttcactgtttttgcgtaattttaatgctggcctttcaactaatctatatgaaagaaatgcggatgcagcagtaacagcaattagggctatgatcagcgggtaatcagacaatgttttattaattccagtgtataagaagatgttgataatcaccatgtgccatatgaaaatccccatactgatatcatctaaccggttcagctgccaaaatatcttcggcccattgtaaccgaaccagacgagtgcatagctcaggggtacgaaccataaaaagctccatagtgtactgtttattgcgctgagatgtaaaaagtcaattttaaagaataaaaataaaattactgaagataagaataaaacaatatgccgcggtgacttgctccatgctttagcccagaagatgcccaaagtgaaataaaacatctgcggcaggaaagaatgtaagtacaggttaccgaagacactggccggcgcacactttaaaactatgaaagaagctaacacactgaaggcggcaacagcaaaagagcaaagaatcatttttttgaatccgaaacgtttataaaaccaataaatagcgggtaacaccaggtaaaagctaatttgaacaggaattgtccaaagtgaatcgttaaggcgacctgtgccaatgtgatgaaatatgtcagggaagtattgagggtatagcacaagattgctcagaagccatatccagtaatcttttgtagtgaatactgttaatgaaagagctcctagaacaattagcagtacagtggaggcaagagcataggtgtatatagcaggggcaattctaatgattcggctccaataaaaatcggttacattatttcctttaagcctggatctctcataagaagtgaaaagaaaaaatgcacttagaaaaaagaagattgatatgccggtgtgaaacgatgctttactctctggggtataaccaaagacagaaatgtttaaatctcttgtagcatggccaaccaacacacaaagagcagcaaacagcctgataacaaagaaacaattagaatgctttacgttcattaaaagaacctctttcctataccatatagcgaataagcagtaaggctgcctataagcagtgatgattatatcataaaaatggaagaaacgttcttaaaaatgaattaaataaatatttttgttctctataaaggtttaatatcattataaatacatgtagatactcatagatttatgaatatctagctatatcatagttgatacagaaaaatgaagaatctgtgtgcctgttcgctctactttaatctcaaatgttgtataatttgggaagagggggagtggatatgaaaaagttgggtttgagtattgttgcagtgtctttaacttggtgtttgagtagcggaagtactttggccaagattacaaaagatgaacataaggtcagctttaaaatgactgagaatgaaacgggctttttcatggctgatgacaccaatctcgagtattggccaactaaattgggatacaggttcaccatttacaatgctgaaggttgtacattaaattttaaactccaaagaattacactggcaggttatgattttactctaagtgaaaagaatttcacgggaaatcatttgaacttgagcgcagaggataaggtgaatggtgatgcaaacaggaatcattacttaagtatcacaaaaggaaccggctgtggtgacgtctggattaaaggcttttatggattcgaacatgatgagccggatgatgattggtaagtttaatacatagtcaaggtatatccttgaccttttttatggatataatgataatttaaagtgatcatacataatgaatgtggggtagttaaattgattaaatcaaatttaaagccgatattagacgaaaggaatatcagtattcgaaagctgtccaatgatattgatcatggttttaacacagttaggaagctttatcacgatgaaatggagcggtacccaagggatctgttggataaagtctgtacctatttaaatatcgagttgcatgagctgctgacatacaaaagggatcaaaatgcttaaatgtttctagtgtgtcgtcttaaacattcctcattaaaatataaagggagattctgaaatgattgaattcaaattaaagcaactagctgaagaaaaaggaataagcggtataagggaactatctaggattctcgaacacgattataaaagtgttcggttgatgtggctgggtgaaataaagcgggttccaacagatctaattgaaaaagtgtgctcctattttgacgtcacaattaatgaactgatggaatttaaaaaagatgaaaataatagaaaaaagcgttgatccgttttagggatcatgatatactaaagttacaagttaaggaaacaataaaaaacaatggaaaagagagtgaagagaatgaataatttagaacaacatttaaaagagcaaacggatgcctttctggcagattgctttaatgaattaaaacagtggcgggaatctggtgtcttagagcaagggaaggttagaaatttacatgatacttttaattcgaatatcactcaactacatatgattagtgaagtaatttacagggagatagcatcaagattcgttgaaagaatcaagtgaaactagagaataaactaactcagaacttacaaaggcctgcaacttatacatgaatggaggaagaattacaggcgactttttaaaagcagtatatttcacagggaaaaggggagagaaaacatgaaggattattcagtaaagttctacgatcaggactatatgcttttatccgatataattaaagccgaaagtttagaagacttaaaaatgagtgcggaaagtaaagcgaaaaccgtgatggatgagaatggagttaatgagatcacttggacagcaagtgaggttgtacttaaagggaaggttatggagtaggaatacaaacttaattagaggaggaaagaccatgataaaacaagaagaaatcatcttaatggaagcacttctaagagatgtaaggggtaactggtcagatgaaatcatctccaggttgacagagacaaaccggattgcgaagaggtacaattttgaagcaatagaggaagaaactcgtgcaattatagattcagaaaaggtaggaaaaaataagaattttgatgggagatgttttatatcagactataaatcaggcggttatgaaggcttgagcgaattttatggaggagacggcaattttaaattgaaggccaaatcaaaagaatttttgcaaaaagtggatgaactgatgacaaatgactggcttatctttccggattttgacgaatacaataaatgcaatgtttaaataaaatcgtactttcataaagaataggagaaaagagatgttgccgacttctttaaaaacaaaagttcagcgaatcttattacaaggtagctttaaaaaatctgagagctctaaaagcagagtaaaaggactaagcaatatttctgcgggttttacttttgccaagacgtttgacgacgattactgcctctattatacagccggtaatatggctttccggggaatgcctaacgaagaaaaggataatcaaacagaaaaaatgtatcagttcttattggatcagggtcttcaaaaaaatattgaattgacaaagtttagaaatcaaaaagcaatcttgttgaaagtggaataattgcgagacactttgaggaacagtataaaattgcactttacaacaaagggagtgatgaaaatgagagaggaaattcaagtgttacttgaggaaattcaagaattagaaatggctttaagcaagtccgataataatactgtttcagctgttctccaagaggcaatcgataaaagacgtaatgaaattggcgagctaaagccaaatgggtacgtcatagcagacgtagtccttaaagacggtaccgagttaaaacggtgcttagtttttactgtaacagatcgaatggggtcacaagctgtaactgaattagttgaagcaagagaaatcttcgaaaaagataaagcggtttatttgcaacaggaatatgaggatggaaactttgcaggggatataggagtacacgaaatagcaacatacaaccttgaatatgaaaatggtgtcaatgaataaaaaatctttaacctagatagaggtgcaatatgcaactaatcaatgacacaattattctaactaaagaaatgaaggatattttaggtgatgtggtggaatatgcatacataaaaatgccttcctggtcaagtaagcaagattttgaagaagtctactcagagatgttgggacaaaaggcaagaatagagcccgttgattcctacccgattttcgttaaactaacaaacagcaaaacatttacactttggtcatctgagtggggcggaataagatctgaaacggaaaaaggatacttaaacgagtaaaacaattaagttaaaatcattcttttatgtggaactaagacaactgtggacgaaaaacaatcatcagaacatgaaaaggtgtttaaaacgcagatatgaaggagtgaattaatgaaccagcttacagatacaactaataatatttggagggtaatcaatagacataagagattgataatcgctattgttgtaatcgctactgttgggtacctcgtgtttggcagaagctcaggattaacacaggagaagtttcaagataaaatatacaaagtttcaaacggagttattgatattaatgattcgaaaattgagaaggttaatgatgggtcatctgtctatatggccaaatggaatggtttcacaattacggcatctgtagatagtaaagaccgtattatttttccttatggtgttattggccttccttcaaatcaaatggatgaaatttccttggggcaataccaagaaataatgaaagcattaagtagtgtagcagattcaaaactttctgatgaagataaggaacggttaattttaaatgaattgaattttaataatgtaattgagacaggaacaaaacattccacctctaaaaatggaataaagtatgaattgattggcacagagggtgccttattatttatgcttggcaataagaaataattgtgaaaaatcataaatgcacaatgagggagaggatgacttatggcagccaaaatgataactgtctggtacaaatacgatgataaaggtagcaaagccaaactaaatcatattgaagatggatgggtgaatgaagaatatccaaagccaatagatccgtcattcacaaatcaagaagcatggaagaaaagtgattgggaaaggaaacatgcttatttagatggacaacatcgagtattgagcgttccaccagcaaattggattaaataatgaaccagcagggggagtatgcaaatgatcaaggtttatacaagaggtcataagataccagaaaagattaagtcttgcatctctgaatggaattattggtcttggattgtagtttccaatactgcaaagaggaacaaggatgcgaaacgactaatagagaagattgaagctgatccagacaggattgcagaatataaaactgaagacggaattgaagtatatgtaagctacatggatccagtgaaataaaaagagcattaaactaaatgctcttcttcataccacacctacgacactcacgtaaaaacacaccacttttcactgaactcttgaacaaagcgtaatcacagttgtcacagcgtccatatttaacatcgggatactccttataatcatacacaactgttacatcgtagccattcgtctcaaaatctttcttttccattaaatttcacctacacaaagtatttaacactactataataccagacgatgtatataaggagggctttaatttgattggaatagcatatttcttaatagtctggcttggtgtaggctttctgacaggatttaaggccttatttgttgatcaggtttatgatgaagagtttaagcaggaactgattgattcattttcaccaggtatggagcagaatttgattgaactgttctttaaaaataaaataaatatcatggtgttttacatactgattggattgctgccactggccataaaaattgctggtctgctgaagaggagttagctatgccggttatcgataacttttttgttattcaatttgaaaatgatgattacttcaagtcatttaaattagatggaagtggttataagacatctaaggggcttcatggcgcttctaagttcactacaatgtcagaagctttagtgatcgcaaatgagctacatacggagtttaaagccacttctgccataaggcaaattgaagttattactaggtgaggagtgttcaggtgtactggattgaatggattgaggatggagagaaaaaaagcattgttgcggatggatggattgaatgggccacaatcctggaagacctttatcagcagcgatttgaatatgttgaatggaataccttgtgaacggatgaaattaactcgtattcaagaaaggaaggttagattttgattgactttttatataataatattcagtggatttttagcggtgtcggtctacctattgtaggttggatatgcttaaagtggaagaaaacaaaaaaggaagacattcatgatacaaaatataatcaacaaggcggggacaattcagttaatattcaagggtgtaatgtagaaataaatgattttaaaaacaagggtgataaatagatgaaaaagacttgctcgcaaagtggaggagatcactccgtcaatatccaaggagagactgtacatgtaacggggctatcatatggagatgcaaaacaaatatgtaacgatattttcaaagaaaatttttataagctttctcaagaagctaataagattgctacagaaagagcaaatactttaattgaaggttttctagaacaattttctaagaatcccaatttacctaatcggttttctgatcctgacttgcaatatataatttatgtagcacaaagggattttgtaaggtctggcgaaaaatatctataccagatgttaaaagaattattagttgaacggactaaagaaaaggatagatcgtttaaacaggtagttctcaatgaagcaatagaagtttcttctaagctaaatactgaacacattaatttactaagtctgcacttccttttatctgaagtaacttttccgtgccaaacaataggagaattaaattgtttgttaaataaatatgcagtgccgtttctgccaaaaaaaatcccttcattaaaccagatgatgcatttagagtattgtaaatgcgagaacttaacaaaaggtcaaaatgagcatttttcttatttgattcacatggcatacggtgggatatttcaagctggttttgatcttgagcactatcttaagacatttccttatctagattcaaatatcctaaaagaaatggttacgcctctttcagacgaaaataatttatataagttcaatgttcagggattttttcatttattagataaaattgaaattttgggttcagtgtttattcagcatcaaagtaagattattgatttttataaaaaccatcttaaatcagaaaatgaaataagtttggctataagcagatatgaaagtatccgtaaagtaaatgaaatatgggacagaactactcttcctgagtttagaatgacctccgttggaaaggttattgctattactaatcttaatcaaaatacagatttagatattaaattagaagaagccttagctaaataaaattacaataataaaagacacagttgtgaagaaaaattgtgtctttataaaatacgaattttaaacagagaaggattccttaaaaaataattagaataaaaataaaataaatacttgtaattctgacaactctaatgtatattataaacaagggaacattagttgggaaggggtggagtaaccaatgaaccttaagcagatgattaagaatgaatgtgaaaaagacaaccagctcgcagcgaaactctcaaaaatagcagggtacgaaaaggttaatggcttttacaaattcatcaacaccccagagaaagaaatggacaacttaggcggtttaattaatattgttaaaagcttgtttcctgataatgaaaagcaacttttgagtgattatttcttgtcattggatcccaataagaaatgtgctagacaatctgttgaatatgcagatttaaatcagtggaatgcattaactgataaaataattttaaatttatgcaattcaaaaaatgcgacaagcaaagaatggggtaagacctataatatacatagaaagttaacagaaaacaagatatccttaactgaagcaatcagggaaactggaaaatgcaaaacagcagaaatgatattcttctcaaatgcaatgttaatgtatgaataccttaaaatcggtgaatttggattaatgaaaagtacagcaaaattgctggattttcaagaaatatcagacgcttacataaaaggcttgtacacctccagagtaagcttgttgaaagctaatataagcttcaatgagaacaatttaattgaagcaagaaaatattgtttatatgccactgaaactacaaacgtggacaggatttgtttttttgcatatttaacaatcggaaattcttttatattcgaaaattttgaagaggctaagcggtcttatattaatggtgctaagtatgcaagtaacacaattcacaaagagatgttagaaggagcattatgttttcttgcaagcttttgggacaaagagaatttttgggtgaattatgaatcacagaatactaaatacttgcaattgagggcataccattatatacgaaaaggtgaagttgataaagcaaatgatattttaaatgagttatcaataagagaacaagatgagaatgagatgggattttatttttattatagaggtttaatatctgtagataaatctgatttttataaatctatacgctgtttcaaaaaatcagatgacaaatattcagttcaactgcccttgattgaacttaaaaaaatgggcgcggacatagaactgttaagtcttatttcaatttagagcgatgcaattgaaagggggtgaggttgttgaaaaaaacgattttaggtgtagctattattgcggctctggcattatcatttgttgcaggacaaaaatcagtaaacactgcagctccaaacgatgaaattagtgtagcaagcatcattcgtggggcttaaaaattcacaacaacgatactacataatcaatggttagacgtttgatccactggatcaggcgtcttttctaattttaagagaatgttccagaaattcataatataaaaaacaagaacatggaggaattaaaatgaaaaagcatttcggacaatcactttcttatgaggatatggccaaaggttacgaagaaatggcggctattaatcttgtaatttcccaggaagacaatcatcttgaaaatgaagcagaaatgattagatcaaaatataaagcaaaggtatcctaatgaggattaaagacaaatcagcagacattttaacacatacataggggatgtgttatttgtcgtgaataaaaataaaataaattattgcatattattctagcaacatatataatgaagttacaagatgaacgttgttgggagatgaaataatggaaacaaccagtgccactcaaaaggaagagttgaagattacatcattaagacaatatcaatacataaaacaactaaagaacttcacacgagtcaatctccacctagaggatccagatgtgtttacacctaataatgtaactacaatgagaaaaaatcataaagaatataacctcattaaagaacaaaagaattctataaaatgcatttaaggagtaaaaataaaatgaataataaatattatacagaagaaaacaagactaaagtttggaaaaagcatatgatcgttttgaagtttctagagcagcctgagatagcagttgcttataatgagttcttacgaagagaagcgacaagtgatgaatgggttgggttcgaagaggagttgtatgaggaactgacggggatgccaattataaacgtctgcaaggatgagagggtaaatgtcctaaactgaattttattatagaataaaaataaattaggtgtgataaaatgaatacgggcatcttaattaacgctcttaaagaatacgacatgttaaagcaaatggaaatctgtaacgccaatataatgctgctgagtaatattcaaggtgaaactgaatggattgttgcgtggaaagaatttgatcaatacttaatgaaaaaaatgatatgaggtgtcattatggaagctcaaaagaaagcgtcaacactaagggattattcaatatacaacaacataaataggtggtttgatgaattagatttaagaaacagggatcgagaaactggagaaattgaaaagtctaatactagagccacgtatgagaggcatataagagagtttttcaaccactatgctgccaaggatattgaatatttaactgagagtgacctggcgattaagaagagtgacctgtatgattatcgaacccatttggctaaaaataaaagtaactccaattcaacaattaacaataagattgccgcactgaaaagtatgattaagtaccttgaatctgaacatgagtgtgattcatctgtatttaattttagacctcttccaacagaaaagaacccagcagggtcttttgaaggaatatcggaagctgatgagtttgctgaggcagcttatgttactgagcgtcagaacagattaatgaaaaagatgtttattttgtttagtgcacgtactggtgggcgtaaatcagaggtgcttagagttgggtgggatgatattacttattcagaaaagcaccaatgctatctcgtcacctttaaaaaaactaagcaaaaaaaggctaggccagttgggatttccactgctttttatgaagagttgttgctgttaaagcaagagtatggggaacatgagcttttatttcataagttaacagttgattcaatacaggatatgtggaatcgcgtatgtagagttatgggcattcccaaagaaagaaagataactccgcatagtttacgcaatactgcaacaaacttttcttacagcgttaatggtgatattaaaaaagtggcagcgttctctggccacagtaatatcaatactttaaatgaccattatttagtcaatgaaagggattattctcaagatccaggggttttggttgatcaaaaagaagacatgtcctttttagaagatgttactttagagcaatataaagaattctttttaaaatcagacatgtatatacagaataaacttaaaatgtttttgaacaagtgatacaaataatcatataaaagctttacttgcttatgaaaataatgataaatttaatatgattatgtgaggtgataatgtgtctgaagttttgttgacaacggataaactttataagttaaaaactgaaatagaggaaaatcttaatgatattaaaaatgatcccaatatggtgaaggaattaaaagccacaatggcggacaaatacaaggcactccctggttatatccaagaaattttaaataataatgataacaacgtacaacgtttaaacgaaaaagaagtgtacattgtttcaaaagagatgtattcaattcttggggcgcaagctttagatccgtcaaattattttccaaccagattggcaaaagagcttgaaggtgggagagtattcgccggtgaagaagtagttaagcttccatacaagtttaaaaatgtgattaaaattaaagaggataactatgtcacttccattactgccaaagaactgagtgagttatataatagctccatcctgcagtacaattacaacattcagcgtgaaggaaagtacattaagggtagccttattcctgtacctaaaacaaaccctaaatcagttgatgagatcaaagaattgtttattaaaggcgatttaattgtatcaatgttaacttttaacgctcgtcttggaacatctgatggtgatgaagaagttgaatatgatccaagcgaccaatccctcactgtaacacgaggaaccttattagatgctcttgatggatatcatcgaatttcaggtattgttaaggccattgctgaagtccctgaattagatcaaccattcattttaaatgtgctcaattacgatgaagaaaaggctaaggttcactttgctcaaatgaataccataaacccagttgaaaaatccagaattgaagaattgggacaaaaacggtattcttcaaccgttgtcgagcagctgaaatttaaaagtgaacttaaaaataagcccacaaagtgaaattggtatcgatagcaattttcttgtgacatattatactttatcagaagctatagacgatgcatttgagttgaaatctcgaaaagatgcgttgaaaattgcgaaatacctggtagactttttcgataaccttttttatgccttcccagatgaatttcttgaagatgatttatcgtccattagaaagcaatcatacattaatcataacgtaatgttttacggttatgtttatttggccaagaagatgaaggaaaacaatgtagaactaaacaagcttgaaaatatccttaatacgattgactttagtaaaagcggaagagtgtttgaagaattaggaagacaaaataatgaaaatcaactaaagaatgttatgaagaagaaacttaagcgaatattttatgatgaaattgctgttgtttaaagcctaaaggagaatttaatatgagtgaaatgtataatgctgaattgaaggaaaagtttttagagaaatacgaaagtgaagcaacaagaaaccattattggctaaggctaagggatttctcagctacagaaaaaatacttcaaaaagacatatttaatttttctttggaagagctgcgtacgttatttttagatttagatagcaaatctatagattcactaagaggagcaagagctgtaattggacaatacacaacctgggcaatggaaaatggcttggcaaacagtaacatcaacaaagtgtatcagatacaggatggggacttaaagcagtttatagataaaaacaaaaaaacactattcaccaataaagaagtagaagaatatgttgattttatggttaatgatcaggataaagcgatgatacaggctatttatgaaggcatagatggttatcagcattcagagttactgaatttaacaggtgacgatttacttgatgataacaaggtaaagcttgtagatgataaacacggtgtaagaataattactgtaagcgacaaatgttatgagttgcttaagcgcgctaatgatcaaacaacatatcatcttagcaatggttcgccagagagtggacttaaaaacaaatttgctacattagttaaaagcgaaaatatttttaggttaaaatataagagttctaatcagagtatgaaagctgacaaatttttaattcaccgttcttttagtcagtttcaaaaatttttagaagaacccttcttttcacctaagaatcttatcaactcaggaaagctcaacatggcgtatgagatatacaaagagaagggtgaattaaaagtacctgattataagaaaataactcgacaatatggattcctgaatgaagacgcggagtttaattcacaatcactgaggaaagtagtgaatatggagaacttagaaaaatattgtatcaagtctgaagtaattgagactaattcttaatccctgttacagggattaactttacataacttttagagtaaaaataaaaacaatgtgaattaactcgtgatatttttaaaaaaatatcaggattttgttcatatttttcagaattcgacaaagttagacagagacaaatttgtacatatgcagtaaaatagttctatacactaaaaagggtacaaggaggttcgctaggtcaaactccctagcgattaagtcaatgtttgattttccattcatagaggtcttcaatcgaacagtttagggcaattgcaatgattctcgctgtttttatattcatagaaggtctaacgccattagcgtaatcacttaacctttgcttactgatgcctgttaggttcgaaagttgccctagggacattcctctacgttcaaggagaatggatatcaaacattgtccgatttcaacctcaagcatcggacaacctcctgatatagtattgcttatcatactatatcaattctttccaagtttttaaatgaaagaaaaaagatttgccactaactaggtaaaaggttataattaagtcaacaaaaaagggaacgtaggttcggttaattactaccagagagagggaaacgtatgtcagaaaaggattatttcattcaaggggagctgtgcataccttttttcggcagaataaaagccaagaatgaagaggaagcacttttgttcgcatatcaatcaattaaaaagaaattgagaaataaaacaggaaaaatggggtttcttcaaaaagatcatgaaaaatatgaggcactatttgatgtagatattatgtgtacagaggatgctgaattaacaacctcttatgccgaagaaatagacgattcgtttgaaaatgaggattataaatcttcacaattgttatcatcgaagtaaaaatacatacacatcttgtcagtcatcatgagacataaaaaattggtgactttttagtcagactggagcatacaatggattttaatcttgaaattgacttgaaagacattatgagatcagtttccatgagtgttggttctaagaacatccaaagtggagagtactacatagacattatttttaaaaacaatggggattgtttgaggattagaatggatcatgcttcagttttagaatttagagacaaaataaatgaaactctttggaaactagacggcatgaagacgtttatgaagacagcagctttacagtatgagtaaagctgatttttttgaaatttttaagagtaaaaataaaataattgtttacaacatttggttggggttatataatcgaattagaataaggaaaggagatagctttaattattgattaatgaacaaattaacgatcaaataagaactatggttttaaggaaatatgaaaagctcttagcatcatgcgaaagatctttgcgcagcatagagaataatgaaatcagaatggcaataggagacctggactttgttaaagacaatttagaggaaatacaatacatacttcgtgatgttgtgaatcagcatgaatatattaaggataaaaataaaatgtaagttttatagagattaagataagggggaataacatgggtgcattaatcgctaagcaaccgaatggacggtactgccgatttagttcagtggtagactgcccaacgcacataaatatgacgcgtgaagactatttaaataattttactgggacaacaaaaggaagggaagatgctgaagatacacttgcaaattatctccggccgtttcacgaagttataaagtggtacacaccgctgaacatgagcgaaaaagagtttgtggaggcgttaaaagaaatgtgtgacgaaaacccaaaggaggcgcgggaattgtgaaagtgaagcgtattgaatataagctgtggtacgaagttaggttcggatggacgcatttcagtttcggcgctaatgatgataaatctgcattgaaatatgcagaggaatacgcaaaaaataactacctcataaattataaagtggaaaaaataacgaatgagagattgttttggactgaggagggtgcggagtgattagagcaacagaaaaacagttgagactgatcggacgcatggagcaatacattagtgcaagattcaccggtaatacaattagagaagcaagtgagtttattactaatcatatggatgaataccaagaagagagagaaatggccgatgaatcaaaagttttatatgatgatattttctatgaagaaggttggtaaccttgccgagaagtattgagatctatataaaagatgcattttaaatagaaaataaggcggtttaataattgaagttagtcgagactacattaagaaatcgaattagagagatattaagtgaaaagggattaactatacatgatctgtcatctttgaccggtatcaacgtgcaaaaattaagttgttatgcttctggtgtcaaatgttctatgagcattcaaactgcattacaaataagtagagggctgggtctatcagtagaagaaatcttttacgaagaaataatttatcaccgggaacttatgaagggagaactttcatcatacatgaagacggaagaggataagcaatacattatacaaaataattacacaacaaacatacagtacatgcataattctcatttacatcaaggcaacaattataatgctagtgatttaaaagaatcgttagccaaccttatatatttatttaaaaaggagtacgaaactttaaatttgaaatttgatcaagctgctttatcttcggatgccattaaagggattgaaaaagagataggcaatgagtcgcctgataggagtaaactcattaagtttttaaaaatcttaaaggatgtaataaagggagcggcatccacagttattgggggacaaattaatacattaataaaatctataacagaacagggtatggggtgaattgatatgggaatgtttgatacctttaatggtcaaattaaatgtcctaattgcgctgcaatacacaacacagaggttcagtttaaatggagtgaatgcttactattagactatgagttgggggatgttgtttcaggagcaccagaaggtttatatgtcgaagatgattggtttaatgagaggtgctcaaattgcaaattagaatatatgccgaatgtggttttgaaaaacgggaaggttatttcatttattagcaaagaggagcttcaaagagcagacatagctcaattaaaagatatcccattaaaacatgctaagacacaaaggtatgaaagagataaaatcgtcgccaagggttttactaaagagtctgccgattttaataagcaaccatttaaggataagcaggttataacggcctttgagcgtaaatggaaagttgtaaaaggctggagaaaggattttaatccagaaaaagccagtgaatttttcaaactaaccggttgtgcaacaaggaaatctgattactggttcgtttatatagttgtagatgctacaggattgaaacgctttgttgaagtatccgacagaataaaacattggtcagacaatgatgacaggtacggtaatatgctattcagtgaaacctatggatttaaagatcaacactttatatttagcgaaatcttcttataggggttgggaagacttaaaagttgtattggcagcgggagaacatagggaattggattaaaagtaaaactttatttagatattaaggagtaaacatgacgagatgcacatttgttaacgatgggttattcggtcaactttatgaaaatgaagtcaatatgactgaattagatataataacatacatcacaattcaattagtggcagtaaacagaaatttcaagagcaggcaaaagttatcggagtttatagggtgtagcaacaaacaacttaaagtagtgttggataggcttaaaaatttaaaagggacatgtaacagttactgtccaaagtatggagacgaggtaaagttaaatgaaaaaggacgtggagtttctaagagcttagttactgaaaataaagaaattgtttatgatgtcatatcaaaaagaaatcgtaaattaatatcctttcgccccaactacatgccaaactatagatatgacgaagggttattaaaaccactggaattttttattgttacttcagatgatatgtatctccttaagaatggtttattgacaagatctgaatttgttacatatttgtttattcttaaatcatatcaatatgataaagagttaaatgatcaaacttttttaagttacactgacatagcaatgaaaacacgaagaaaactcacccaaactacacatagccacatagaaaaactgaccaggcttaaaattgacggtataccaatccttaaaaaatttgaagcagatagccatgaactctccgatagagggttggaacctatttcaagatttgtgcctgtatttaatttagaaaaatttaaagaaagtagatggaaaaatgaaatttgaaccaatggataaagttaaatttaaaacagctagtcatttcaacaaacttcgaaccttaaaaaaaagagttcctgaattagatgatcctttactcggcgaatgctgggaatttgaaaaagatgggttaaaacaatttgattgggaggagaactacgaatttgtcgctagacccaaacattttaattaggattaaaaaaagaatctaattgaagttttaaagaaaagaatgacttcggagtcggcagacgctatattaaaattaagtgattaaggggtaataaacacaaaacttttgaagtttagcagggggcatagcgatgaagattagacaaagatatgaatgtggggctgataaaattgctattcagtattccattgatgaaaaagggatgattaccagccttaaagaagtgaattgggactcaagcacagaagcgggcgagctcttacttccgagaattgaagttactgataactgctttaataagataattaacaatcccaaaatggtttaagacgataaaaagtaaaatttcattcatttgaaataacggagggaaatgaaggtgacggaatcacaattaaaggaagaaaatgaaaatttaaaaaggcaagtggatcatatgaaagaggtctataaagaaaatatgtctcttcacatggcagtaagacagggcgaacagctaaaggccaacctacaagcttatttacgacaagatgaccgagtatatagtcctcatttcattacaccaaaacaaaaacaatatattgtgactctgttcaaaaaacatggcttgtctccactcagtaaagcaaaacgaaaaatagttaggcggtttaatgggggcggtctgatttcagagcacgaagcacaccaagttatacaaatgtatgaaagaaagtaatagtgaatcttggtttggctgtttcaattgtaaataagaaggaaagaaattattaattgagcctacagaatcacaataaaaagactgttttaaagaaagggtgagaaccgatagtcaatttcaaaaaacttagtgatcctgaatatattaagcagatgggaattgagagaaatgaacgtgagcggatatatcaagaaaaggagactttaagaaagaaaacggtgtgcttcactggtcataggccgaacaaattgggtggatatgatatgaaaaatccaacaatgcttaaactcaaagaaaagctgcttgaagtaattgaagaattaatcactaaggaaaacaagtccaggttcataactggtggagcattaggaactgatcaggctgcttgttggtgtgtacatattctaaagaagaaatacccacatattaaaaacataattgctacacctttcaaagaacaagataaagtgtggtctgaagaacaaaaaatgtggtacaaacgtatgcttgatgtggcagatgagattaccaatgttgaagaattaggtaaatataaagttagtggagctgtatcaggggaattttcatcggctaaaatgcaaaaacgaaatgaatacatgattgatcacagtgaagcaatagtagctgtctatgatggaagtaaaagtgggacaaggaactgtctgaattacgctaggaaaacatacttaggacatcaaatttggaggctacatccgaaatgtgattttgaattggatataagctatacgcctggatgaggaggaacatataacatgaaggaatttaaaattgtgaatttagatggagttaattggggatcgcataatgatgaaactttagatttcaaagaattgattacaggaggaacgattgcagtaggcgacgttgttaaagttgaaggactaggcgattgcccacttcctctaagggagaaccaattttgcataacatttaacaaagaaaatgaattgtttcttgaagaaccattcactttagaagaatgcaaatcattgtttggtgcagaatttaaatattgaattaaaaggattatttcattgtaaggaggaaggcacataggttatttaaagcacataattgatacagcctggtttaatttagtttggtttagatggcaccttggagcggacataagcgtatttgacggctgcggatggaatacatatagatatttgaagaataaaaataaaataagtggaggttacaagggtgatcaagaggaatctgcttagcaaccacgttgatgagattattggtgaatattacgctgctaaaggatattcagtccatagcattgaacaccaggaaaatggacaactgattgttgttacggaacgagtagctgaggagaaggaacaggcaaaggttgatattgcctttgattttgtacatagaagaccacataagaagaagtatttagcttaaaaaaggcaaagagtcaaagctctttaccatcaggtgttttccttaaccggttcgcaatgtacttcattacgtttactgcaatcgacactaatgcaataatcaatgctatttcaaataagaggatgtatccaaaattcacattaagcttttcaaagtaatcgctggtaatagagaggattttataaatccctagcataaaaataataaaggaaactcctaaaattacaagtgactttttagaataatctttagcgtgttcaaaattataaatcattattgataaaaataacaaacccgtagcaattttgtgggataacgaatcatcggccgaaaatgattgcactactatgctgatgattaatccagtaataccgattgttttattcaaggaatcacccactcgtatgtaagttaggtatgagtttaccaattaaaggggattttctcaagatgatacacattaaagttaaattaaaatgctttcacaagaaaggggtggaaacatgcttggttatcagaaagggaagcaagtaaggtggcatgaagatggggagatgggaattatattgtggacgacaaatcgaggttctgtgggagttaaatggagctcgggtgaatacagtgaatacaattataaagttgatgagttactaatattaacagattagtattttacccaaaagtgaacgcatgacagcaagaaaaaggtttagtctaaatgaaatcgtgattttaaacagataggaggaaacgatgaatcaagatattcagtttttaaaagaacttcagcaagagttgaaaaatcaagacaacgacggtcaagctgcaccacgtttctggacagttggtgattatgaatgggtcgaagctcgagaggaaaatgcagaacggtattctgtatacctgccatatattgcagaagctcatacttacgcaatgacagcttggagggcaccgaaagtagagcggctgcttaaaattctcgaaacgtttgattggagttcaataacgatatctaaataaaagatagttttcaactaaacatataaggatggatcgttatcgaaattataaaaatccgataacgatcgcagaaggggtgttaatctctataacgccttctttcctcaaagtcatcgggatactcattctgctttgacttgaatacaaaccaaattatagcagctagcatgtaatccatgactttttcaaaagtccaatttgtgaaaagatccataagaattttcattgcctttcgcctcctgagacaaaaatgtcctatctctcttagatggcatgtgtatgacacgcatctattaataaaagagtgaaaagcaatacgaaaatcaaaaaagaattgaaaaaacataaaaaatatagaggtggagtaaatggcagaaactaaggcgaacacaaatacaaagattcacgtattggttgatgaaaaactaggtggcaccaagcgggaatacattgaggtcgataggaaggcggaggtcggggagaatatcataatcgttgaaaaagtggatttcgaagaatggtacgaaatcggcgatatttttacggtagaccgtacttaccacacagcggatggagccgtgtattgcgacgacgcatcatccgttaataatacttacggacttatccatctctcagaataccgggtactcgaaccgaccgacatcatccacattaatggaatgcgttatgaaatggttgatcgcaaggcggaagcgggcgaaaaggttattcatgtttataaaggagagtcgaatggcattgtccgaattgtccgcaaagccggcgatgatggagtagatgttgatacatacgaagatgagggagaattatatagcggcttttatcatggacattattacgttctcgtccctctagataaagagaagacctttgaaaataaaaatagtgtatacaaagaagtcaaaaactacatacataatgaattaggtatttcaaagcaagacgtacaagaaatgattagtatagcggtttctaatgaagttcagaagatgtcagagtcaggaaaactggatagatttgcgggagaaaagattgaatcacttattgaagaagggtttagaaatggagatcgactgctgtatggatttaaagaaagggtgtcacaaacagtttccgatgaggtgggtaaacggattgcaaacgtgttaaatattaatgtggaattaaaggaggaaaagaattgatcaagaacgaacgagaagattatttaagcaggcttgctgaatacggattaacagaagaagaggaagaggaaatggccaatattttaaatgattttgtgggctatgatatttggtgatcatattagaatcaaaataaaatagttattttatagaaagaggggaagagtgcagatggcatcagaagagcaattgagacgaatgaacgacataaacgatttgatcaagcttatcgcaagcattgatcatcgtacattctaccgcaagtcaaaggatcgcatagcgtatttcagatttaagaaaaaactgttcttcgttgatgattacacaggggatgacgtttacccatatgaaatgggatacggtagtccaaacggtttttcgcatgggggcaacatgtggcagctggtcaacagcttcagaaaattcatcataacagggaaatacggtgaactgagggattataaagaaatatgggcttacagctatgaaggatgtatgaaaatccgtcagaaggcgaaggagatcggtttcattgaaagtgttgattacccctatagttttgatgaatgggcaagttaaaactaattgattcatgtactaaattttcatcaaaattaattagctttgcattaaggaattatgtaacggagagattagactctccaggattcaaaggaaggtatgcggagtttgccatgcttagtcttaaatctgtgtttaaccttacataatatcggttctacaaatatatattcatcagattcagactttatatgtttcatagagtggaacttacttcgttctgctttcggcatgaattccataaatccagctgcagtaccatcaggataagagagaaggaactttatatcctctttggtgtagcctgtgataagcacatctgtgtaatcatagttaatcactttcagccagctatgggaacgtttattgatttcataaggggagttagctttctttagtacgattccttcaagactcttttctttggctagattaaagtaagctaatccgtttccttgcaggccttcaataacaaagacattattatgatcaagcttaaggtctaaaaggacgtttttacgttcagtgagcggcttattagcgattgaatgcccatcaatataaattacatcgaatacacagtaaaccaccttatgggctgatttcttagacataaagcgttccatcacagcttcgaaatctggagcgcctcctggggtagcaacaatgatttcaccatctataacagttccgttggggatatcgagatccaacagttctgggaacttgcttgttacttcattgttgtgacgagtgtaaagctttatctgatcattaaacttggagaggatcagtctaattccatcaaacttcagctcggtaatataaccatcgtcatcaaatggctctttgattgaatgcaataacattggcgatacaaacaatatatcacctcctacttagaacataatagctaagcgaaggtgatatataaagcaaaatgactgtggtaattaatgggattcaatgagctccggtgagttgtttttaggtgagttaactaaggatgaaacttgataagcttccatgtcattagagttgtacggcaacagtaagctttgaagataatcagggtcagtgtttttaggatttagccattccttttcattctcatctgtaaggataactggcatccgatcatgaatgtcttccataagctcattaggctttgttgtgatgattgtgcaagtatacagcggatttccttctgacgtgttccacttttcatataagccggcaaaagcaaagagattggaggatttgagcttaatacgcataggaatcttagtctttggatcaagacgcttccattcataaaaactgtcagctgggatgatacaacgtttgcttacgagtggctttcgaaagctgggtttctcggccaatgtttcagcacgagcattaatcattttatacccgatcttttcatccttagcccaaggaggtataagaccccatctaagtttgcccagacgattatttgatccatcattaatgattgtcaggatgttttgtgatggagcgacattatagcttgggttgtattcgtcttcagacaaaaattggtctatattgaactgttcgatgatgtcgtcaaactcagaaaataaagtgaacctgccacacatgttcatcatcctttagggtttttgaatattgtacaggcttgatacacgaaaatcaaaaaggaggaatgtgatgaagcagcaaacagttgaggttaaagaagtggatgtgttaattagagggatatggacaaagaagaagttcactgatattcaaaaggggcaaacctttaagattaaggagaatggaagagcaaagaaatacatagcaagaacagatccttattgggatgacatgtatgagacttacataattgatttattggataaaaataaaataagtgtattagggtgatgtttctgaatttattgagagatgcacggatattaagaagagaacttttccttggagctttagcgttagtaggtatgaacttgttcgtatattttctatttggtggtttaactgccatagacaatcagaggataataacacgaagaattggaatgtttgttgtaagcattggaataccatgttcttttattctaaagtacttgatcgtttggagaccgttaatccgtaaggtaatggaagagttaaaggaagaagatcagaatgaacgtacactcaagaaatatgaatttctaagaaagaaatttgataaaacagagattttataaagaaaaaataaaataaaatggaggctgcacaatgagggaaattaagtttcgaggaatgggcatcaatgaagaatggtattacggtaatctatcaatcattaagcaaagaatcaagagcatgggtattgatcctggttcttatatctctaataaagctggggttccatttgcttacagtgtcaggccggaaacagttgggcaatatactggattaaaagataaaaatggtctagagatttacgaaggagacattttagaaaaaacttctgagttatacaccaattttgggaaaacacctacaggaaagttccatacttcatacattaaagtgatttggattgacgattgttggggatatgaggttatcgaaaataacggtaaaggcccaatcattgggcataaatggaaagggttaaaggtgactgcaagatattcagtagtgtacggcaatatttatgaaactcctgagctagagtctaaataaaaacgatattttatagaggaatggagtgaagcaatatagatagaacaaatcgtactttgatagagcttgaattaatgattgaagacggaacagttcccaaaagattgattaatcaagtaaaacagtttattcatagtgtaaaagcacaagaaataaacattgccgacctaagacattcctcagcgagaaaacaacatggagatgagttcataactttattggaaaaagctaatcatcagcaatattttaaatactatggtgtagtatgcgataaatttaaaacaaaattttgagattgcgtgcgttaaaagtgatttttaacttaaaaggaggtgattgagatgtaatttatttcagctatctgaagtttataagaataaaaataaaaggaggtgattgagatgtaatttatttcagctatctgaagtttataagaataaaaataaaaggaggtgattgagatgtaatttatttcagctatctgaagtttataagaataaaaataaaaggagtgtttatttaattgaagattaaaaacagaatagtggaattgctaaaaaagactaaaggagcagagaagagagactttggacggtacactctaatctgcccacctcaccgcgaagtgaagctattaaagtataacatagttaagaagacttttccattcttggtgacagctctggtctcattcctgaatccagtgagtattttagcagcggacaagtatcggaactttgaagagcttaaagcgaatgaatcaccgttcaattttagcgtattttcaaaagagcaagactctgatgtattaattcttgctccccatggaggtggtatagaagggggaacaagcgagcttgcaaaggaattaagcgaaacatactctacatatctttttgaagctttaaagacaccaggagcatttgatttacatttaaccagtacaaatttcgatgaacctcaagcacttgaaatgttgaaggagcatgagttcacactgtcacttcacggctacgcaagtaatgatcaacatgttttagttggcggcacagatcggaataaagctgaagcgataacaatcacattaaataatgccggctactctgcagagcttcttgatgagggggcaaggttatctggcagcagtccgaacaatgttgcgaataaaaataaaacaggaaagagcattcaacttgagttaagcactggactgcgcaaatcaatgtttaacaccttttctctaaaaggacgctcaggcaccagaaatgagaacttttataacttcattgacactctgtcacggtttatcaatggaaatgtagaagggaagggtttggcaacatgaacatgcagcagcccttatactattctgttgatgctctggattggggaattgatgataaagggtcaaatgctattgaaacgacagaagggataaaccgagctttaaagtacgcaagctcaaaatcattctataaagtacatataccaaaaggtacctatctaattgatgctgtgaatacatcaaggcggttgcctgaattcggcggaggtattaatattccttcgaatattgagttaatacttcatccagaggctgtttttaaagtgttgcctaatgattctcaaggctactcctgtttttatattggccaagcgagcaatgtaacgattcgtggcggtcaaattataggggatcgatacgagcatgattattcaaaagtaacttcaattaaaaggacacatgaatggggatacggaattcatattcatggcagcagtaatgtgttaattgaaaatgtgcaagtctctgactgtattggagataacatttggatagcagccgatgggatgatgaacacttcaggagcgtatacgccttcaaagaatgtaaccgttcgaaagtgtactcttttaagagggagaagaaataatctggctaccaatggttgtgaaggtcttcttgtagacgactgtgatatagaggaagctgggggagataccattgggccacaattaggaattgatttagagggttttggagaaaacggaattaagtatgatcacccatacaaattaactgtacgaaactgcaggtttaaaaataatgggcgtggatccgttacagcccacacaagcggtgaagtaaatcttgagggaaactacagtgacaatgttatctcttatggattcagcactgatgtcagtgttaaggacaacaagattattaataagggaaaatccaagaaatatggaattgactcggtgggtgtttcaagcacggagtcaggaaatagagtgcaaatcagcggtaacactgtaagagggtttgaaataggcatttgtgtaagaggtaaagggattgatgtaacgaacaatatacttgaaaacatcgcggcttgtccgattgcaacacatgaagcagaagatgtttttatttcgaataatcatattgaaaacagcgattgtatacaagttcaagtgcgaaactcaaaagatgtgagagttacaaataataaagggggaaataccacatctgcttatgccattaaaatcatggattcgaaccgtgtaagctttgcaattaatgaatttgcaaatgtgcacgggggaatttattgtgaaaggtctcaatcagttcgtttaaagttgaatgacctattcttaagcggaagtggatacggcatcttttgggataaggattctgaagtgtatttcaacagaaatgaaattcataatccaagaaatgttgcaatcaaaggtacatccgagaaatacagctgtcagatcagtgagaatcagatttatttctgtaagtcattgattgctatccacctgacaggtggttcagaacacatgttaaacaataatgagatcatgtttaatcgttcaacagaccagggatatggagtgtatttggagaatacggacaaagtacggcttgtaagaaatgatgcgcggggaattggaggtaagctattatctcacccttattgcacagataaagcaaagaatacaacgttaattcataacacatatgatagtggaacgctgaagacagcagaaggagatgttgtagtctaaataaaattgtagttttaacaagattgggagatggatatatggccaatattttaagtaaagaacaagatgaagcaatccggtatttcaagaacaagctaaacatatcggaaaaactgtacatatccctaattaattttaatttgcttagagataaacacgaagactttggcaatagactatatgagctttataaaacagatccttatctgtatatcaaagcgctcaaagaaggttacgtggttgatcagccaattgaatttaatgaagcaattgtgcggttctatgatggtgaagaacttgctgtaattcataagaccactgggaaaagatataatgtaaatgtaaaaatgaaaaagcttcctgacggttttacgctgcagtcaatgaatatgtggtcatggagtgaggttgtttaaataaatttaaactgatattgctagcaattttagttataatgaagtcacatggtaatgtttggaggggtattgtgtcaaaatcatatgttctatggggcttcattgtactattattagcttgtttttcatttttatcagatgtaataactgtaacaggttataatttcatctattggtttcagaatcaaattcctgaatcggtagtgatcatagtattgttttttattattattggtttaatttattgggttaaatctatttataggcaaaacaacaaactaaaaagcaaagcaaaagaacttgaaaacaaagttttagaacttgaggcagaaagattgagcaaggctgataaaagtttgctagaagaatttttacaaacgtttaatgacaaattatataattttactgagatgttagttcagactcgacaattatcatttaaccaaatgcagaacttggaaaatgatgccgttctttttggatatcctcataaaaagtttgaaaacgaacgacttgagaccgctaaaagaatccttttggatagactgaactcttttcttgatttttattctacacatactataagcactactgctccaacaatcgttagatttaagccaaaaacagaaaaagacgaaaaggattatcaaacaaagctaaaagagttctatgagagttgggaaacatttatgaaagttgttggaaatgaaacacgtaagtaggatcatatcagccagttagtgctggctgatatataattttttatttttaagaataaaaataaaatagttattgaccattttgtttagatgatgtaagattaaattatcccatagagagaaaggaggaaagagatgaaaaaggaattaaagatactgaaagtatctgctgaagctttacatacctacaaaaacgatgtcaaaaggaattacgacattgatgaagaccaagcaaggagaaaattaaccaggaatgtgatgttggtaaaggaatttaaaccacaaggaattaaaagaggtcttttttctaaaacatattcatatggaaacttaaagatcataatccggcatggaacagtaataaggattgaaaatgtaaaaggtgatcctgaaccttgggactttccaaaaaagagatacatagaattaaacaagctacttggtataaaggattgtaagtttagtagcaagtctcattataggcattttaaggataaaaataaaatataaaaaagaaagaggtgcggaatattaaaaaggtaaaattatttacacacactgacctagacggagttggttgtgcaatagtatgtaaccacttattaaatgacgtggaagtagagttttgtgattatcataatatagatcaaaaagttcttgaattcataaataataacaggtttaaggaatatgatttaattctcgttacagatatatctgttaataaggatcttgctgaaaaaataaatgaaattcaatcaacgtctaaatgggtacttattgatcatcatgcgacagcgaagtggttaaatatttataaatgggcaaatgttaatgattactatattaaatcaccatgcgaagaaaacctaaagacatctgctacaagtatggtttatgaccatctcattaagtttcaaaataatgagtgtgaagaattgagtgaatttgtagaaaaagtaagaagatatgacacctgggagtggtcaacaaaatataatgacacccatgccaaaaaactgaatgatcttctttatattattgggagagaaaactttataaaaagattctcaacaaatccatccatttatttttcagatcatgaactacatattttggacattgagaaatttaaaattaaagaatacatatctaaaaaggaaaaacaactgagaactttgcaagtgcttgattacagtgcaggagtagtgtttgctgatacatatcaatctgaactagggaatgaacttgctcagaaaaatcctaatttagatttcattatcataattgatcctggttcattaaaggtcagttataggggagtcaaggagaaaattgatttaggaaaagacattgctgctaaatttggtggtggaggtcacccccgagcagccggtagtcaaattaatcaaagagtcatagattcagttcttaaattaatcttaaactaattattctgggaggaattatattgagcaaactttataatacatttgaatttatcggtaacctatttatttcaaacaataaagagaaattccatgaaattaaggaatatgacagcggatgggttaaggaaagattgagcttcgcagttcaagagtcaaaaacaaacagtgtttttgttgagattgaaggtggttactcaaaaagtaaacaaaataaagtgttttcatttagcaagggtacagaaaatgaaaaaggatcaagactcgaaattccatgggaagatcggttgaaagaagaaacagtaaacatggttgctgatttttctaagatcctaattaacttaaacgatgagtcaacaaaagccaaattaaatgaattgaaatttaaaattagagggttggaaatgaaaggctctcttactgaagaagaaaataaaactttatctactctcaagggagaatataaacaattaaacgtaaatggtgcagaattcattcatgaatatgatgctattcagtacttgtcccaaaacctcgaaaagcataaagacaataaatttaaaatcacaggcaatattgaatacaattcatggaatggacggaattttagaaagttcaaaatcaaaaccattgaaattgtaagtagtgatacaccatctcaactaagagccaccatggatgtatttttcacaagtgaatctttagatgaatcgtcatttgaggaagaaaaaaggtactttgttgatgcgtacgtacttagctatgataatcaggcaaaaaaagatcgattttttcctcagcaattagtcatcaatgcacaaaaattggactttgaaaatgaattacatatgaaacggttagatctcttgaaaaacttctttaaagttgaaaatgatgaagtttttcaccttcaatgggttgtgaatattttcaggggtgctgatgagattgagtttaccgaagaggaactcacggaaagtcaaaaggaaatgattgctttaggtttaaacacactggatgactttaaacctaaaggagggttattgggcgaaaatcgtgaagaaaatagacttttaaaacctattttaaaaaagtttaatgattctaatgattttacagaaggtgccgcaacatctacatatgaaattgaagatcttacatatattccacaacagattcaaaattctacaccacccgtagaaaaagaagaacctaaagtgactgaagaagaaaaagataatgcatttgatgagttatttgcttgatttgaaaagacctaactaacatttatttaaaaacaataaggagatgtttatccatatggcaagaaaatttggtaaaaagaataaaattaaagttaatcctctcgattataacactggaattattggtgaatcggggatcggtaaaacaactctagctaaagaagtttgcgaaaaattagtcggagaagacgggtatataatcttgaatattggtaaagaggatggtattgatgccatccccaatgcctcttatgaagatgttcctgattggacaacctttgatgaaattactaaagatattattaaaaacagaacaacagattatgctgatttaaaggttttagtatatgacacatttgatgagttgattaaaattacagaaccagaagttattagactacacaataaagcaaatcctgaaaaaagagtgaataccattaaagcagcattcggtggtttccaggcaggagaagacaaggtaattgagttaattcttgaaaagatgtggaaacttaaaaaggtcggtattagcatgtttattttaggtcatacgaagaaaagaacaatgacagacgtagttactggtttggaatatgacatgctgacaaccaatatgacacataaatacttcaatgcgattaaaaccaagctccacgtcttgggagtagcatctattaatcggtcaattgaaaagaaaacagtaaaacaaaaaattgggcctgacaaaacagtgggaacagttgttgatgaatcaagaatcatcacttttagagatgataactttaatattgattcaaagtcaagattctcagatatcacaccatcaattccattagatccgaatgaatttattaaagcaattgaacaagctatccatgtggcttttgataaacaaaaaaataacacaaataacattgaagaagaaagaaaagaacaagagcaaattaaagaaattcaaattcacaacgaagttaacaactcatcttttattgataaagaagagaatgagagattggcagaagagattaagacactattccctaatgcaactgacgaagctaagggggaaatgaagaaaattatggatcaatttaatatgaaagattttaaaggggtagacattgtaccaactacagcattcgaaaagatagtcgaagcattatctaactgaaggaaaagagggggagagtctcccccttatcaataggagagggtattcttggccagaagatgtgtatgtcaaatatgtaaagctaatggaactgtcgatacttttttcagggtttctgacgataaggggaaaaataaatactactgttctaaggatgaatatgaaaactatatcaaggataaggtgaaacgaaaaaacctcttaaattacatagcgaaagatgtcttgaattatagcgagggtcaagtcatttctccaatttttctaaaaaagatagccgaactaaaaagtttttatgattatgaagtgatacaaatttgctttgagaagaaccaacaaacaattcaatattggttaactaataaagagttttacaacgagtatggaatgattagctatatttttaagattgttgaaagtaacatcaatgatgtttataaggaatggctgcatgaacaaaatcagagaatgattgaaaaaaatcatcatcttgatattgcaattgtaaatcaaactaatatcgttgattccacatctttaaaacaaaacaattcaccaaaaaatataacagagtttctggatggggaggacgagtattgaacaacttagattcttatccaaaggaattagttgaaaacaggggacaaattgaaggaagctttatattttgtttatggaaaaaccctgatttgtatgaggattataaagaccacgtgagggcggatagagattttctaacagaagacgggaaattttattactctctaggtttagaactgagcaacatgaattataagagctttgatgatgcaagtgttttcagctacatagaaggtaaagaaacattaaaaaatggttttattcggcgaggtggaatgaaaaccattgatgaactcaagcacgtattaaacgatgaaaacgttgatacatactatgatgagctaattaaatttaacatgatacttaaacttcatgataagggatttaatgttacgaacgagcttgataaattcaaaaaaatgacgagtcagcaattgtacagttactttgaatttcaattagataatgtttttctaggtcgaggttcaggagttaaaattgaagatctggatttgaatgaagagtttgtcgaatcaattgaaaacggggaagaaatgggattaagctattcagctgcatgtccattattgaattatcacacgcttggacttcataaatctaatgttcaaatttttgctggatttagtgggacagggaaaacaagtttttgtgtttcttcttatatcatgtcaattttggatcagggtgaaaaggtaacaattatcgccaatgaaatgaataaaagggcttggcaacatatttttatggcaacaattttaagtcataaacttggttattatggtttaccaagaaagaaacaaaaaatgggcaacctgaagcatgagcaaaaggaaatgttacaaaaggcaattgaatattatgagaagcattacaaggggcgtatcaaatttgccaagatatatgattacagcattaatgatgtaaagagaataatgagaagaatggcaaaacaaggcttcggttatatgctttacgatacatttaaagctgaagatgctgcttcaactaatgtaacaggtgagctaattgaagcttcaaaacagttattacaagttgcggaaaaagaggatatttgtatcatcattacaatgcaattagccatttatatggagaatacaagatatctaacagcgtcttgtttatcaaatgccaaagcagttaaggagattgtttccgagttagttctaacaagacctttatgggaagatgaattcccaggaggaaaattcgatgttaaaccctatagattcaaaaaagactcgtcgggtaaatttactaacattaaagaagaaattcagttagacccaaataagaagtatagattattctttttgaataagacacggaatgacgaaggcgatacagtgttgctataccaatttgacggtgcatggaataaatggattgagctcggttattgtactcctaaacatcagagaactacagagcggacatgattaccaagggacggtgaaatcatggacgtatatgatcttaagaatcacattattgaaaagccagattacatagaacttattttagaaaagacggggttttacaacgttgatgaacgcggaaatgagtatagatgtgcaagaaaaaaaggaagaaatccgacatcagtaaaagtaaataaaaccactttaggtgcaacctgtttttcaaccaacttaaaaggtgacttgataacacttgttcaaaataaattgggtttatcttttcccaaaacaatcaaaaggatatctgaaatagttgattataaacgtgaagaagaatataaaccacctgagttaccattcggaggtttttataagaagataagaaaactaagtaatccaatggatttggatctagaaacgtattccgatgacattttagatcaatttgaatccgttccaaataagctgttttatgaggatggcatattacctataacccaatctttgttccaggttggttacgatagtgtttccggaagaataacggttccatggaaatctcttagtggtgaattgtgtggtgtaatggggcgccttaataagaaggaagttaatgatgaggaaacaaaatggttgcctattatttcatttcccaagtctaaaacgctatacgggtttgttgaaaattacgattcaattagagaaaagagcattgttttgatcggggaatcggaaaaacattcaatggccttagcaagtaagggattgaatgttggagtttctttaggcggtagctttttaagcgaaattcaagcaaatcacataaaatcaatgtttccgaaaaagtcattagtcatgatggatgaaggattaggtgaagaacatagcgtagaaattgccaacagcctaaagtttgaaaatttctttgaaaatgaagttgggtacatatttgatcgtgaaaacaagtatctgcctaagggatcaaaaatggcaccagcagaccttgataaaaacactctacaccgtctaattagagactgtacagtttggatatgaaaaggagatgattgattgaaagaaaaattaaatgaattaagacaacaagggaaaaacatttattccttttcaaagctcggaacctttaataactgtgaatatgaatactacaatacatacgttttgaaaaagaaaggcatagataatatttacacccttatgggttctgaattacataacgggattgaacagatttataaaaatgaattaaacattggagaatttaaaaagggatttgaaaatagattaattgaattagagctgaatggagtcaactttccgagtgactcaatcggggacagttggaaagcagacattggtcatttcctaaacaattttaataaaattgacagcaaaatggttttagagaagctgcttgtatttgaaatatcagatggaatatatcttcaaggatatgtagatgcaatcctgcccagtgaaaaaggaaaaccgtacgttagtatttatgactggaagacatcaagtaagtttgccggcaagaaattaaatgaagcaggaagacagttattgatgtacaagcttgcgttggagcaaacaactgacttaaaagtagataaaatcctatggttcatggtgaaatacgtttatgtatgtacccaaggaaaaaccaaagtgaaaaagaaaatgtgtaacaggggtaagtgggtaaaggaaatacgaatgcagctagaaaaagagatgcgcactctggaatatgatgatttcgaaattgacctgttgttagataacgcagtaaaagaaaatagcatagactgcttacctgaagagattaaaaataagtattggcttgaagattgtttagttgaatacgaagttactgaagagaaaattaatgaactgaaagaatatattactgatactgttaaaaagattgaaaataaagaccgcgaagatgaaacccaatgggaaccagtgaaaatagataaatacaattccttttattgtagtgtcttatgtggtcaccgaaaaacatgcaagttttataaggattttttaaataaatcatcaaataaatttaagaaaaaggataagactgatttgtttgataacctattttcttagggggtaatgatgaggaagatattctatgactttgaagtttttaaacataactggatggttgtgctgatcgattacgatactaaaaagggtaaggttattgtagatgatgttgatgaactgaaacgattctataagatgtttaaagatgatatttggattggttacaactctagaatgtatgaccaatacattctaaagggaattttattgggaatgaaaccatatttcattagttcgagaatcattaatgataatgtaaagggatttaatgttgttggaaaaggttataaaatcccattgaataactttgacataacaaccggtttccatagcttaaagcagctagaaggctttatgggttcaaggattaaagagtcatcagtaccatttgatatctcaagagcattaacagaaaaagaaattaaggaagtagttgagtactgtattcacgatgtgaaacaaacaattgaagtgtttgataataaaaaagaggaattcgaaagccaattggccctaattgaagcctttgatttggaaatgtctatgtttacaaagacaaaagcccaattatctgcatttatcttgggggctgaaaaacaaggaaacaggggagatgagtttgaacttagatttcctaatacattaaaaattaaaaaatataaacacattgttgattggtatagaaatcctgaaaatctagattataaaaaaaatttaaaggtggatgttgcaggtgtacctcatatttttgcctggggaggtttacatggcgcaataccaaagtataaagatgaggggataattttatgttgtgatgttgcatctctatacccttcaatcatgattgaatatgattacataagtcgaaacgtgaagaaccctttgaaatatactgagatcagagatacacggttagaacttaaacgcaaaaaagatcctaagcaggctccctacaagattgttttaaactcaacgtatggagcaatgaaagatcagtataatccactatacgacccgttaatggcaaataacgtatgtttagccgggcagctgctgttattagatttgatcgagaaaattgaaccgtattgtaaactgattcagtcaaatactgatgggttgtttatgaaagttgaaaaggaatctgatattgatttaattaaggaagtcgcaaaggagtgggaaaccagaacacgactagatttagagtgggatgtttatgagaagatttatcagaaggatgtaaacaactatataatcattgataaagaccaaaagtataaatctaaaggtgcttatgttaaaaaactaaacaacctggattatgacttaccaattgtaaataaagccatgattgagtattttacaaaagacattccagttgaaaaaaccataaatgaatgtgatcagttaagagaatttcaaaagatatctaaggtttcaaacaaatatatgtacgctctttatggagaagaaaggctacctgaaaaagttttaagagtttttgcttctaatgatgaagatgctaaaggtgttttcaaggttaaaacagaagaacgaattgaaaaaatcggaaatactccaccgcgctgctttataaataatgataacgttattgatttaaaagttcctgattatcttgataaggaatattacatagagatagccaaaaaacgaataaatgattatttaggaatatcgaatagaaagaaaacaaagaaggagaagtgatatgcatcgccattgagagtaaaaataaaattaaaacacacattttcaagtctgtttatggtatgatgattttaattcccttaaccactttttcttacataagttatgagcaacatttacataaaaccgagggaaatgaagactcaataaaagaatcattttataagaagcctagacagattaggatcccatcaagtgagaatattgtcttgcggttatttaaaaaagctcaaacgaacaaagaacaacaattaaaaaagcatacagagaagattatctcagcaaaactcattaaacctaagcaaagtaagaaaaggcacatgagaggaggtgaaaaggcaaagcatagagtttttaagagtaaaaataaaatatacaaacaaagaaaagaaaacaaggcaccggccgcaaagaaatctatccaggttaagctgagtgcttatattgcacactgccaagaaggatgcacaggaacaactagaacaggtgttgatgttactcaatcaatctattacaaagggtatcgtgttattgcaaccgatccaagtgtcattcccttgaattcaattgttgaaataagcattggcggggaaacgttcaaagcaattgcaattgatactggtggcgcaatcgttggaaataaagtggacttgctcgtagcaaccgagcgtgacgcaattaattttggcaagcaaaatgggacaatctcaattattagttaggagaaggaggttaattgtatgtttaaaaagggagagaaggtgattgctggtttcacagaagaaattggtgttgttgcacaagttgataaaggacatgagcaattagaagttgagtatccagatggctcatatagagtaattggcttcagcaatgtgagaagggtggaagataaatgacgatgataattttagaaggaactgactgctgctacaaatcaacagtggcagataagcttagcaaagaacttggatatccggtcataaagggatccagctttgaattagctaagagcggtaatgagaagctgtttgaacacttcaacaaactggccgatgaggacaatgtaattattgatcgatacatatattcaaatttggtttatgcgagaaagttcaaggattactcaatcttaacggaagatcagcaaagggagattgaggagaagattagatataaagcaaaagtggtttatttacatgctgatccgaaagttattaagcagcgtttacttgaacgtggtgatgaatacataaatgatcgagacattgagccggtcttagagttataccgagaagtaatgagcgatgtaggattacatacatattcgtgggatacagaacaatggaatagtgatgagatcgtagaaggtttgattcaattatttgagtaaaaaattgagagaaggagtgaattaacactcctcagtaactaacgtgcttctactgtaattttaaaaattacataattgtcgttaatgtcatacgcgtaaaccaatgctgtgcccaatgttgaatgagaggatacaacaccactggaactaatgctaataaggttgcttccagaaacaatttcccaccgggtgtaaccttttaatagagatacgttagaattcctaagcatgtggtaatcaactgtaccgagcggatcgcctagctgcttaacttggtcaactgatttgacaggtgttagggctgaagcttgtgatgtgaatgcagggagagctagtgttgtaagcgatagagcagaaacaatcaagcctttgtaaaactttttcataagaattacctcctaggttttgattgtgattacaacttcagtctagcatgttaaatatttgaaatgtgtgaagtgtttgtgaaactgtttaaaagatcaattttatttagagtaaaaataaagtaaatggaggttatttattggggtgtctttgtgaaaataaatatttgatttggaaaggggatgattttttgcaggatgacaatagagtacaaacaatctgggtatgttcaaaatgcaaagaatcatttgtatatataaaatcaattggctgccataagcctctaccttgctttaaaatggaggtgaagggtgctgattaacttggatataacatataaaacaactattgataatccatcaaaacgggttcttgaaatatcagatgcatttggagttggaataaatgaatcacataaacacgttattatagagaacttaacaattccagagtttcaaatcatgtatttaactggaatgagtggtagcggaaaaactagtatgcttaattattttaaagaggagtattcttttactgaaccggatattgaatttgattctgaaaagcctattattgatactataggtaaggatactgaaaatgctcttttccttttgaatttggtgggcctaggtgaagcatttctatatataaaaccttacaaagtcctttcagacggacagaaatatagatataaaattgctaaaattattgaaagcggacaaaaggtttggtgtattgatgagttctgtagttttttagacagaacaaccgcaaagatcgttgcttttaacacacaaaaaattgcaagaaagcttggggttaaactaattgttgcaacagctcatgacgatcttaaaaattacattcaagctgattatgtgtttgactttggaatgggggaaggattagaaataacaagaaatacaaaagaggttataaacccttttgttgatgaacttgagataaccccaggcaccattgaagattataaaaagcttgggaaatatcattacaaaaataaagatgctcgctttactaaatacatatttaagatgatgtataaaaggatacttgttggagttgcagtttattcaatgccccgacagcaattggttggaagaaacgttttcttcaataaaaaatatgtaaacgaacgtgggattccaaaactaagcgaagttaacaaagactttttgatggggtcaagattcatcatacaccctatgttcaggggcgtagggttaggttctgaacttgtaaggaaaactgcacctcaggttgacagaccttatattgagattgtatcaactatgagtaagtacaataagtttttagaacaagcaggggctcattatgtatgtgacaatctaaatgaagataaaatcaaaaagcaagaaaagattattaaactttttgaaaaatacaaccttaattatgaacttatttcatctattgactactgtcagaaggttttagatactgtaccagttgaagaattgaaaaatgcaatatatggggttctaagacctaatttctttaacaatagggcaaggtttaagaaatatgggattgattttcaaaccaagaaagagtttatggagcctgattttcctttaactccagaaattttaagcttggcaaaatggccaacaactacatattacatatgggacaatacaaaaattgagagctctcagaagtgagactctcaataaaatttgtcttttaaagagtaaaaataaaatataagaggtggagtctgcggtgaactatccagaaagcttaaaagagaaagccgaaaagattaaagacgaagtaagaagcggaaaattagaagaggagaaaataaaagcgattgctaagtctgcagttgaacttttaagatccgaagagaagagccatacacattatgcagaagttgtcggtgcaattgctgcaaacctagaagatttctttaagtcttatctaaaagaggattaatataacaggattaaaagaaaggataaagggatgtttattgaaaaggtactatgttagatgtaaagatcacaaagacgaaaatacgtctttaataattgaggcgttatcacctgaacaggcaaaagaacaagcatatgaagtacataaagtaagagatatttataatgtgagtctgggagaaggaaagtcaaggaattatcttgaacgaaaatatgctccatacataaaaaataacaacagcaaggcggtaattatcttttcataagggaggacgtccgtgcgcatatctgatccaataaaagaaacacttgtgcaaaatatagatcaacttagtagcagagttgatgagttgttcatttatcttgaaaatgagttgccgtcaacatctgaaagacaatggaaaactatagacaataaattcggtgagatttttactaaatctaaggaattacaaaattacataagttgtttataaaggtgagcaatatccccttgatataaggacatctgtgttacttaatattcaaaatcatcagtatttcttaacaattatttatatgattggtagcatttattaaagaaagaaggtgatttatgagattgtctgtttgataagtattggcgccagatgagaattatatttttacaaaggggatattttaatgaacagttatttttatcgaacgatcttagcactagttgccgtatttgtgctggccttttcaacatttcctccgaacagtgatgcaaagagcacaatctcaacagataatgtcgacaaggataaagtaaaatcagaggcagaatttattgcagatcacactattgatgtgagtaaaaagactaaggaaaaacttctttccaaggcagaaaaagcaattgaagatggagacattaagtatcataaatcaaacgaaaaggtatttgataatgcatcagttagagctattaagtatgatgatggcacagtaacttattcggtttcttatttatacgtggacactgaaaaagtagacagagttagctcatttaatgtttcgtttgatagcgatatgaatattgaagagtactatgaagttgacatgaagaaaatcagcagcactcaaaacgaaatgaattattgggttaatggcgttaaggatgaggacaagtctggggtctttgaaacaaaacaaacttcagaggacaaaggaagtacatctaacatgatgagtgctcagaagagttggactggatgcgtatcagattgcttaggtgataagaatattagccaatgggcaattaccggtttagctattttatgtggagtttcatgcacagctggtgttccagcaacagcagggactgcttgctatgcttgtgtaaattctgctggtattattggtgtaaatgcattctttgattgtatggagaagtgtaaatgatcaatatcttaagtaaaatactatttgttttgtctggttgcgctttgttgatctttgggataattttaaagaatggatcaatggcttttggattgtttgccttattcttcatagcagcaataattgttcgtgtatttcataaacgaactcaaaaccattagcagcagccttattgtactgtaggggaggaaactctcctactttttaaaaaatattaagagtaaaaataaaatagttattgattgttcgggagaaagcgagtatattagaaatataggaagcgaggtgatgcattggagtgtgttaaatgcagggatcacattggcgacatcgtttattacataagaataactgacaacaaagaatgcaaggaattcccggtacataaagaatgcggagaagcaatcaagaaagaatgcattgagaattgcaaagacatgaaattagaaaagacattggattacttgcagttattttaagagtaaaaataaaatattccttttattgagaatggagagatgctaaatggataaattgaaagtttgtttacataaaaaaggtgctcatacgttagaaagaactgttaatggggactggatattagattcaaaaccaattactcaggatcaagcaattaaagaactagttgaagcggttagtgatttaggatattggtgccaagtagcaaaagatgttttagataaagaagattttaatgcagttcaagaagcgtatgaatacaaagaggaggtataaatggcgaaatcaagattaaacggttattgggataacaagttggatgccaacgaaacagtttatgttgagagggtttataagaaaggatatgtaactggatttaagtatttacaagttggtgagaaagaagttacttcaccatttagggctacatatgaagagttagaggggaattataatcaacggaaatactaataatttcccgggcaagcgcagtatacgacaaatcaaaacaaataatgaggtgagatcaattatgaacaaagaacaatgggtagttgaggtctatgcaggaaaccaatacgttggaaaaatgactttgccgaattcaaaagaagtggagacttttgatcacagggaacaagcaattactgaggcacagaaactgaaggcaaaaggcaccataggaatctggtgtaaagtagtaccacataaggaggaacgtaatgcatctagctattaaacttgggaattttaagtaatgtctaaataaaattcaatttttatcgagaggagcaactgaaatgcaggataaattaatgtcagcagttcactttattgaggtcaatcgggatgaaatgggtgacaagaaatcactaaacatgcttttaaaagccgtaaagaaaatcatcaatgagggagaaaaatgaggtttcacatacttgaagagaaacaaatgagaggcatcggttttacagatcacgtgaaatcaaagtggtacttcataaaatcaattcaccctaatattacttttaatttaacaatacataaaaacagtctaaacggtgaaattgatgttctaaatgaaagaagtttgcaaccatatgattatcagtactacatgaatgcttatacaagagaaaaacttgaatttccacatatcatacatgataaagtccaagaaattatgtcttacttaattgaagagggaattatctcagattacacattaggaagttacatataaggaggtggataagtgggacggcataaagcaacatttgaagggaaggtaattaagaaaagttgggggctggatattctttgcggtattactgaaaaggaaaaaactgagttcaaagccttcttcgaaggaattattgatttagacccaattgaagtcggagggaaagtgtatatcccagggtttaacgaatacgtagtcgtaacagacaggcagcgcaacataaaaaatgaatggacatatcagactgataagatcattaagacaattgaagacaaagaaagtcttgaaagagcaattaaagagcaagcggaatttgaagaggaatggcagaaacatgtcagacaagagaatcatcaagttgaagaacaaaatgaagtgagtaaaacatcctggtggaagaggttaattaaaaaagactaaaggagagattttttgaataaggatacaaaagatatttggaacggtttctttatcggatcaggttctctgattgtagttgggttacttatttttgttgaagcattgactatgtcactagttgtctattatggattgaatcatgtgttaaatccattgcttattgatacatacaatattcaaaatgttcatgtcactttacctcatgcatttgttattggtgttttactcaacgtatttgtcaaaggtgtaaaacagtcagatcaagaaagaaacgagaatatcttcaagaaagcaggtaagtctttactgtattcagcttttgcgttgattgttctgtatgtgagcacactatttatttaacaagaagaaattcggaatattcaaagcgaaagaattcttttcttcaatcacatttaaaatgaaattaaatacatggaaggtgatgttatggaattaacaaagaagattacaacaactagaggcacgtatgaaattaaattagttgctgaagaaggaaaggggctaggatgggacattctagaatgggaggttaaggatcttgttacaaaatgcacactggctgcaggcaatggaatgcctttatcacatgttccttatcccttaaaacgattgacgttggttgataaagttaagcgaattgttagtcatgtcgaatcagatgaaacaacaaaaaagagaaaagcaaatgacattaaggaattcaatgaatggagcggagttctgaacgcgtaatcggttaaaagttttattttaaaccgattttgcaaaaggagagtcagatatgatcttaaaagaaattgctttatatgaagaaacactaaataaacatttgccaaatgaaacaaaaatggttcttcattacagaaatgtagaggcaactgaaaacgaagataaaatcacattaaggtttgctattgattcattggtgtataaatggcttgaactaggcggggtattaaagggttcttataaaatgaaaatgacaagcttagaggatgaaacaaaggaggttaacgtgaaaatcgaaaaaatccaaacgaactcagacagaggtttggcggtggaaatagaatttaatgtactcagtccatttcggagcattgagggcgtagctggcattcattcgttctccataaaaggatgattttaaggagttgattagacattagtataagtcaaaggcagtctcaacgtattcgagaagctctgataaattcaaacacaactgctgaggaaattggaatggataaggcattatcagaagttctcaatctactcaagagaagaattttggagctggaaactttgtattatccagagtgggaatatgaaaatgcaaaagtgaagcttgaagagcttagaaaaatggtgaatagaattaatgcacttcgaggaaccgggaaggatgaacaaaatgaatttgaaaatgcaggaagcggttttacatctcaacaaatatgacagcagttcaaaaagtgctcaagatgcacagaagttgttgaatgctttaaaggatacatacgatgtagtcggttgccggtttagacattataaaggcggtctttataaggttattggagaggtcattcacactgaaacagaagaaaagctggttacatatgaagaccaatatggtgttctttgggcaagacctaaagaaatgttctttggaaaagtggttgttgagggtaaagagattaagagattcacaaaaataaactaaaaggatgatgaaaatgaataaaaaatacggactttattgcatgggaacacttgttaatacttatgatgatgctatcgaggctcataatgatgctgtatatgctcaagaagaaagcggagtactgcatgaagtaagagaaattcaataaaaataagaggaggatattatatgattcaagggttttataaagatcagaaacttcaccttctagaagatcctatgcagcagtacaccgtcatgaaagttgaagaaaatgcagtatgtgtttaccggtggatcaatgattatagacacaagattgaaagattcacagatgttgaagaggctaaaaaactccttggagaagggtggccgaaacaataacaaaggaagacacaatgaaatttatacagaaacaattggaggacgaatagatgtcgcaaagtaactataggccatcagttcctagatgggttggctatatactagagctagacaagaaaagaagacaaaatcagtacagaggctcactaacgtcaggtcaagagaagaaggactgggacgattggaagcgtagatattcaagaaaattaaagtacgcaagattaaacggatggacgatcgaagaggagtgacaattcctaaggaggacgaatagatacggcttgaatctagataaaatcacagtttcataggaaggggaagtaaaatgagtgcagcaagaaagtggagagatctaagaagcaaattaattggttataaggcattcggtaaatttagcgatgttgttattgaccatattctcaatgatatgtatgagttggacttaagacacgaaaaagataaaatcaaaaaatagagaaaagggagttgtggaatgggagctgctaaacagttatacgttaagcgcagtcactttgtaaccttggatgaagcaaaagaaaatacgcaagtacatatgaagaatggtggttcttacactgctttaaaaggagagctgattgcgaccaatttagaaggggatcaaatggttatcacgcaagagcagaaggataactacattccagtaccgatgacagagctatcagactatgaagctcaaatggccaaaggctatgctgagatggctgagatcaacttagaaatggttgaagctttccatcatgctgaaaatgaagcagaaacaactacgaatagcttagttaacggggaatataaagaatattgattattacatatgaaagcaagacaggtaacgttaaaaggtttgctcaagcattacaaagggagttaaactttgacatcattgaaattacagatgacttaattgttgaagaagaattcatacatattacatatacgataggctttggggaagtacctgaaaggactttgcattttattattaagaataaaaataaaataaaaggagttgttgtgagtggtaacaaggtttggggtgataactatggtttagctggggacaagctttcagcaatgttccacgtaccattgttattaaagtttgaactaagtggaacaaaacaagacttgcagaagattaatcgggaggtacagcttattgacaaacacaattccaaagtggatcaagctcaataatgagatcatgattcagaaagacggtaagtttcaatttgagaaggataaggaggccgtacacagttactttgttgattacattaatcaaaatacagtgtttttccatgacttaaaagagaaactggattatctgattaaaaatgattattacgaagaagaattcttaagcaaatacacatttgaacagattaaatcgatttttaaaattgcttacagttacaaattcagattcccatctttcatgagtgcgtttaaattctataatgactatgctttgaagacaaacgacaaaacaaagatcctggagagatacgaggatcgagtctctattgtagctttgtattgtgcagatggtgattatgacaaggctattgaggaagtacaagccatgatgaaacaagagtatcagccggcaacgcctactttccttaatgcaggacgtaagcgaagaggtgaaatggtaagctgtttcttgcttgaagtgggagacagtttgaatgatatttcacgggcgatcgatatttccatgcagctgtctaagctaggtggaggagtagcgcttaatctaaacaaattaagagccaaaggtgaagcgattaaagatgtagagaatgcgactaaaggtgtcgtaggtgttatgaaattattggacactgcttttagatacgcagaccaaatgggacaaaggcaagggtctggagcagcttatctaagtgtattccacccagacattacagacttcctggataccaaaaaaatctcagcagatgaagatgtccgagttaaaacactgtctattggtgtagttcttcctgataaatttattgaattggctagagaagataaggacttttacatgttctatcctcattcagtttacaaagaatacggacaatatctcgatgagatggatatcaatgaaatgtatgatgagcttgttgaaaaccctaaagttaggaaagcaaaggggaatgctcgaaagctgttagagcaattggccattcttaggagcgaatcgggctatccgtatatcatgtttgctgacaacgtaaataaagtgcatccaaatgaacatatttcaaaagtgaagttttccaacctctgcagcgaggtactccaatcatctgaagtatcaatttatacagattacgatcaggaagatgaaattggattagatatctcatgtaatcttggatccatgaacattgtaaatgtaatgagtaaccaatcaattgcttcaacggtcagaatagcaattgactcactgacaactgtcacaaggaaaacaaacattgtaaatgccccagctgttgcgagagcaaattcactaatgcgatcaattggtctagggcagatgaacctgcacggttttctagctcaaaataaaatcgcttatgaaagtgaagaagctaaggactttgcaaatacatactttatgatggttaacttctactccctgcagcgttcaatggaaattgcacgagaaacaggggagacatactacaaatttgatggatcagcttacaaatcaggtgagtatttcgaaaagtacgtaacaaatgattatatccctaaatatgagaaggttaagaacctatttggagatcaacatattcctaatattgaagattggatgaagcttaaagaggacgtaataaaatatggcttgtatcactcgtataggcaagctgttgcacctactggaagcatctcatatgttcaatcatctacggccggtgtaatgcctattatggagagaattgaggaacgtacatacggaaacagtaagacatattatccaatgccaggtttatcggctcaaaattggttcttctataaggaagcttatgatatggacatgtttaaggtagttgatcttattgcaactatacagcagcacgtcgatcaagggatttcatttacacttttcttaaaggatacgatgacgacgcgcgatctaaaccggattgacttatacgcgcatcacaaaggaattaaaacgctgtattatgctcgaacgaaggatacaacacaagagggttgccttagttgtgtagtgtaggaggtcagattctataaaaaacaaatatgaaatcagaggcgacactacagccatatttattgagagtgaaaaatttggattgatagaaacaataattgctacagaagatttaccaaaagcccaagaaattgaaggttggtggtgcgttagttgggattcttgcattaaaaacttttatgtgagaggaaacaaaaaagtgaaagatggtgtttggaaaaaggttagacttcacagatggttgatgggagtgactgatccaaaaacgcaagttgaccatatgttacgagatactttagataattgtcgatggtctttacgtattgtatcagcatctgaaaatagccaaaacagaagagttccttcaaacaacactagtggacataggggtgtctattggaatagcaataggcaaatgtgggaagcgaggatagacgcaaatcgaaaaacgatatacttaggttatttcagcaataaatccgatgctgccagagtaagaaaagaagcagaggagaagtattggattatttaggaggaacaaaattgacaaattacacagcagcaaactggtcaaagcatgaagatgatttcacccaaatgttttacaaccaaaacgtaaagcagttttggcttccggaagagatcgcattaaacggcgatcttctcacttggaagtatcttggaacaaaggaacaagacacttatatgaaagttttagctggacttacattattggacacagagcaggggaacacgggtatgccgattgtggctgagcacgtcgaaggccatcagcgaaaagcggttcttaatttcatggcgatgatggaaaacgcggtgcacgcaaaatcttacagcaacatctttcttacattagctccaacagagaagatcaacgaagtgtttgaatgggttaaaaacaataagtttcttcaaaagaaagcaagaacaattgtttcaatttatgaagcagttcagaaaaacgatgatatttccttattcaaagcgatggttgcgtctgtgtttctggagagtttccttttctattcagggttttattatccactttacttttatggacaagggaagctcatgcagagcggggaaattgtaaatttaattatccgtgacgaggcgatacacggcgtttatgtcggattgttagctcaagagatatacaagaaacaaactcttcagaagcaaaaagaactgtttacatgggctttaagtttgctccaagagctttatgaaaatgaattagagtatacagaagatgtttatgatcaggttggtttagctccagatgtaaagaaattcatcagatacaatgcgaataaagctttaaacaatctgggattcgatcatctgttcgaggaagaagacgttaatccaattgttattaatggattgagcacaaagactaaatcccatgacttcttttcaatgaagggcgttggctataaaaaagcaacagtagaatcattaagggacacggattttatatttgattaaacttaaaaaagacagtcttgtcggtaaagtttatgtgaataacgcaaaccaaaagtacaaagtggttcaagtttttagagaaatgaacagatataaatatagaattcgatttcttaaaactgggtatggaagagttgttgaaaaagttgaaatgaaacgcgggaagataaaagataagtttgagaagtctgtattcggagtagggtacatgggcaatgtgaaaatgactgatcataaaaaggagtacagtgtttggagcggaatgcttgagcgttgctatcatccaaggggaagtggttatgaaagatacggtgccaaaggagtgactgtggaaagaaggtggcattgcttcgagaattttttagaggatctccctttgattaaagggtatgatgagatactgttttctcaaggaaagattcatttggataaagataaaattcaaataaatgtgccaataaataaaaggaaatactcacttgtaacatgttgcttcttaactaagaaagaaaacaacaattatagagacttagaaaatattaaaaaagaaatattcgcattatctcctgaaggagttttgattgaagctaaaggaattagggagtttgcaagagaccatggattaattaaacaaggtattatgcggtgtttatctggaagggctaaaacacataaaggatggaaattcaaatataaaagagaggcgatttaaatgagattaattaaattagagcagccaaattgcaatccctgcaaaatggtgtccaattacttaaatgatgcaggcgtcgaatatgagacagttgatgttacacagaagccagaagtggcagcgcaatatgaggtaatgggcgtaccggtaaccattcttctgagtgttcaaggagaagaagtaaaacgaagtatcggttttatacctggtgagttagacaccttaataaatgatttaaggggtcaataatgggattattgatattggctgggattgttcttgttgcaacaacaatagttgttttaatagatacatacggggaattgattttatctgtaatctgtggattcgttgctgcagttgttgtactaattgttgctggacttattgcagtgtttttcccctttgataaccacgcagtattagaagaaaaggtaagtgtttattcaattaaagacaacattaatgtcagtggaaaatttgtactgggttcagggatcatcgacgatacacaatatttgtatttcgtaatagaaaaagaagggtttaagtcagtacataaagttaaagcagaaacttctagagtaaaagagggaaactataaaactccatatgtgaaaaagtatcgttatgaatatacgaataaatttgtaagattcatgtttggggaatctccgccttttaaggatagctcatacgatttctttttaccggagcatacggttacccaggaatataaagttgaccttgaatagtcaataaacgggtaagtttaaacaaactaaaattaaaggagctaacacataatgcaaattaaaatcaaatatttagatgatacacaaacaagaatcagcaaaattgaacagggcgattggattgatctgcgggcagctgaagatgtagtaatcaaaaaggacgaatttaaacttatcccattaggagtggtaatggagctaccagaagggcatgaggctcatatcgtacctcggggaagtacatttaaaaactttggtatcattgagacaaactcaatgggtgttattgatgagtcctacaagggagacaatgatttctggttcttccctgcatatgcattacgggatacagaaattaaaaaaggggatcgtatttgtcagttcagaattatgaagaaaatgtctgcagttgaattgattgaggtagatcatctaggcaacgatgatcgcggtgggcacggatcgactggaactaagtaatacaagccctggcttagatcatgatgtttgtccagtggagggtcttagccagggtacaacttaaaatactcaaaaaattcaacaattatacctacaaaggagatgctggatgaaaaaaagattacgtaaaaaggcgtggatgatagggaatacaaaacatggcgaattcatgtttaatgtaattgataaggtaaatgcagatggatatgtgtattatccaaaaggacgctatcatgtagacagaaaagggaacatgtacaagtttaaaatttagaaaaaagcgaaattgtgatgactgaagtttataaagaacttagggataccaaagggtttattttttcacatttttcacatttttcacattaatgtagggatgtcgattgaacgaacatctctataaaagaagacttttatagaaaagtgaggtgagattcagtgaacaattatgtagataaaattaaagaacatcttcataaaattgctgagcttgaaaaaggattggcattattcagtgaagatgaagaagaatacataagcttattagctaagattcaggagcagttttattttatatccgacgaagcaatggaaggatttaaagaattaactatacatataagaaatacaggacagaaaagaatacaacggggaattgatcagctgcctcacacaatcaaagaaagtgtaagcgaagaaattaaagacataaagagatccggcgagctgtttgattgaacatagttatttataagataaaaataaaataaggagatgtattagaattacatactttacgttattacttgcagcatacttatttgcactaaacattaatgaaattagattaattactcgaggagaacagaacgtatacgctaaagttacgcatatgctttctaattcaccgtataaagaactgaagaaaaataagaacttagtatatgtcattacattgttcaaggggatttcattcatcatccccttggctactattggattgattacgcacggtaacttgttaatgttagcttggacagcttttgctttaatatataccggtttaacaatgtttaaaattcttgatgttttggaaggtgactcaaacaatcatcaaaacaagttcgtgtacatgctgtttgtttgcggtaatattgtcttcgtgattaactttattattggtcgtttcgtttaagcgtctaattcatgttcatgatacgcttcaagccatttaagccctggcctagaaggatgtcttggtgaattcttaactgtgagaagcctgttgtaatgggttttgataacaaatgcctcgtctttatttattccttttaggagctgtttaacatcgttgcattgcttattaaaacttcgtttatcgaatcgctttggacaatcaccccaagcaaagattacctttttagattctttagctaaattggctataatttgatgattagtcttaacggtagcttcatacaggctactgttctctttttgaagcttatgaattattgaggatagttccgctgaatttgtttcgtaaaaaggatagagattgacaatatgaatggatccaacttcatttaatgagtggctaaaattacataacttagttatagtgaggtcggatacttctttgtcagcaatacttggatttaacataataaacacatgtgaagagtctaaattattattaagctttattgataaacaatatcttgcttcaattgagtctgttaatctttcagttttacattccagtacttctttaaccaccgctggcttgtatttgtaaacagacaaaaagatcacctcattccattatgtgggcaaggatattttaccaaacaatggaattgaaaggaaggaaattatgagtcaatttgatatgcagtacaacacaatcataaatgacataattaataatggagtatctgacgaagaattcgatgtcagagccaactgggatacagatggaaccccagctaatgcactcagtgtaatcagcaggaaaatgcgatttgacaatactgaagtaccaattttaacgactaaaaaagttgcctggaaaacagcaatcaaagaattgctttggatatggcagcttaaatcaaatgatgtcaacgaattaaacaagatgggtgtgcacatctgggatcaatggaaacaagaagatggtacaatcggcaaagcatatggatatcagcttagtaaaaagaacagagtgctaaactgtgaaaaagttgatcaggttgattatcttcttcatcagttgaaaaataatccatcatcacgcagacatattacaatgctttggaatcctgatgatttagactcaatggctttaccaccttgtgtatatgagacacagtggtatataaaacaaggaaagcttaccttagaggtaagagctcgtagcaatgacatggctttagggaatccgtttaatgtgttccagtacaatgttttgcagcgtatgattgctcaagttactggctatgagctaggtgaatatgtcttcaatattggagactgtcacgtatacactcgtcatatagacaatttgaaaattcaaatggaaagagagcaatacgaagcacctgagctatggattaatccggatgtaaaagacttttatgatttcacaattgacgatttcaaactgattaattataagcatggagacaagctttactttgaggtagcagtataatgctatctcttattgcttgctgcgataaatcaatggccattgggtatgagaataatttgctttaccatattcctgaagacatgaaacgttttaaagaactcactacaggaaagttgtgtattcagggaaggcttacatatgaaacgatcgtaaacattacaggaaagccacttcaaaaccgaaagaatatcatactgaccaaaaataaggatttcaagcctgatcactcttcattcgtttaccattcggttgacgatgttttaaagcttatacgtggtcaattggatacaaatgaagaagtaatggttattggaggaggcgttatttacgaggcattcttaccacatgctgataaggtttatttgacgattgttgattcagttgctgagaaggcagattcatattttccaaggttaaatgacgattggagagtaattgaaaaggatcatagaaaagcagaaaacaataccacatataattattcatttgtgacttactcaaaataaattgagaataaaaataaaatagttatagacttttgagaagctgaatgataagataaagacaagttaaaagcttgtcttttttttacatacttttagagtgaaaataaaataataaataggagtggcgatatgaaaactgcaacagattatcttgtttccatttccaaacctcttgttgcaattgaggagactaaacaacgacttcaaaatgaaattgataacctttataaagagctaggcaaagttgataaagagctcaatgaattttatcacaagctagaagaggacaaatttaatgcatcagagggatatcatctttcgttaaaagagcaaaagatattgagaaagcgaagaagcttaaaacaagagcttcaattattgaacacacttttcgggagtttaaacaaaaacggatggactcttgaatcactaaaaattgcagagtataggattagcaaaaagaaaaacaagcacttacagtatgaatcggtttaaagacataatccacattcaccttgtgaatacatattgaatccttataaggaggtgattaattgcaacaaaaagagcgagaattgttgtcaaagaaagaacagcttgaaattgatgttttagaaaaggaagcagctttactcaggctagaagtggaacaagaaaacttcaatctccacaaaattggggagatcggagtacttaaagattttcttttatacataaagaaatacagagcaatgtttactgtgcagcaagcaaaagaatttagaaatatgaatagtcgaatgagtgaaatcatcaaagtccatcatggacaagtattggttgatgaagaagctttagagagattcattgatgatattgaggataaaattaatttaattgagattggaggagggggaaatagcggtgtggatgatatatggtaacgcgcccggcggctggacgccgagaattagcgtccaagaagggtgaaaataggttttctgaatgcgaaaacaaatgccgctgtaagagcaatagctactttatcttcggttgatattttcatgaatcgaacctcctttcggtaacttaggtatattgtaccacataaatacgaatgtgtgttcgtttttttaaaaaatttcgggagggattgcggaatggctgaaacgaaagagtatgtacggattaagaaggcgccctgtagatcgatatggtatgcagataagattgggagcatttttccttcgttagggacttgggagaacgcgtataaggtcgatagtccggacagggcgttgtatattcgaaaagaagacgccgaactcatcgtcactgaaaagcgaccagcaccgtacgaattaaacgattcaatagcagcgctgaagctcggcgtacctgaacacctttatcatcacgtttggtgccttatttacgaaatcgaagcattacaagaggaggccacaagatgatcgataaattgacgaaagatcaactcgaagtaatccgaaagcgttcggagaaggctacggaaggcccgtggcgaatcgggaagcaatcaccaaacggattaaataatatcggaacaattggcggattactgactgcacaaacaacggatgaagaggacgcaaatttcatcgcaaacgcccgccaagatattccgtcgctactcgatcacattacttttctaaacgaagtaatatcgagctgccgatgcgctgagtgtggcgatgaattgggggaagattgggcaactaacaacggagtagcgttttgcaattactgtgctggacttaattctttatgaaatctgtattttaaagagaaggtgatgcagtgaaagagtcgttgaagaatgattttcaagagtttgtgagtattgcaaaaagctttcttgctgtttctggagcagtcttttggttattgataatttcacttgtttttgctggaggctattaaaatgaatcaatcatataaatttagtctagaaaaattaccaatagaaagcttagagaacctgaagacagacatacaaaatagaattaatgatggcttgcgtactgataacaacgtatacataaaagaccaaagaagaaaacttcaaatctttttagacgagctggttagacgaagtacacttgttcactaaaggaggtgaatacaatgccagaagtactttacggatttggaagaggagcgtaaaaaagaggggattaatcccctcataaattaatgaaattgaccattcatgctttgctgagccatgcgaaccaaacgttttgtgatttctccacctactgagccgtttgctcggcttgttgtgtctgctcccagttgaacaccaaactcagaagcaatttcatacttcatttgttcaagggcaccagcagcttgaggcacaagtaattcattgctgttgtttgatctgttttgttgagccatatgatcatctcctaaagtagtatgtaaacaagtttgttcaattgtagtgtgtggagatgatttgaaaatatacacattaaatttgaagtgaggtgatttaaatgtcgattggtcatggagcataagttaacacgtacttaaacaaagaagggggataaaatgaaaatcgattatgtttcagatctgcatattaatcactggataccttggaacaataaccaaatcaaatgggaaaggcgaacaagggagattattagaaggttgatatctaatggaaatggagaggtattaatcattgccggtgactttactgagtggaatcaacagacactatgggtacttgatgaagtagcaaagcagtatgaaaaggtctacttcacatatggtaatcatgatctttatctactcagtaaaaatcagcaacgaaaatattccgattctttgggaagggtgcatgatttaattcagaaggcagcagacatcaataatgtcactccattaataaagtctacggatacatacaaaggaaaagcctttgctggagatgtcatgtggtatcttccaaaaggaaatgaaggatgggatttcttcaaaggtgtctccaatgattcaaactatatcagcctaaatggatacaacaaagaagatggggtaagagcaatgtggaaagaatcaatggattggtatgatactcttgaaaactctcacattgatgtatttgtctcacatgtcccacctgttcacaatccctgttctccgtttgagcctaacagctgctatatggtcgatttgccattcattaatgccgaacattggatttgtggacacgatcatttacaagctgagttttatatagaaggaacgagctttcacatgaactgtattggatatccgtatgactatgatatgtacccaagagtaaatgagataccaggtaatcaagttgatacgtataaaacgtttgagctgaagacatttgaaatttgaggtgaaaccgtgaagaaaaaatcagatgatgtgtggacagtcgtgtataaagatcatgatgaagaacctaatgcttattcatactattccaaattagatgcagagacggcaaaactgacaattgaaaaatcaaacggtactcagttagtcaatgaaaaggaagaagtcgttgggcatattcatttagactgggtctatttaatccaaggaaggttatttaaaactgactaagatagagaaaataaaattctaattttatacgaaagaggggggattgaatatgaagagaatggagcagccggaaattaacgatatcaaaactttaaaagagaatattagtaatttcacagtggagctggagaagggggataaagtccaaattattgatatcggtgaaagaggttatgacttgcggcatgttgacagcggtgaagtgttgagggaatgtggatgggatttattcgtttaaaatattgatttcctacagaaacgtggtgatgacttaatgagttcatttgaagaattggctagagaaaatgaaaaaattgctagaaggaaagcaaaacgtattcaaagagctagagaatacacctatcatatcgaactctccttttcaaaagctgatccgatattaaaatcatttcttactcagtcttttgatgaattaagaaagattttaaagaatgatgataaagaagataataaatataacatttgaatgaagaggagatggctgtatggcaataaaagagaggggtaattcacttatacaaatatgattttgaagatggaaaatatgctctaaatataggttgtgatgggtctgccaacttagacacaaaggcatttagaataatgttaaatcaatgcgtagggcatcctaacatgacgctatttgatgataagtctaaaagggataagaggtatgtaaaagcaagaagaatgcttttagatgcaggatatacaatagaagaaaaatagataaaatgtttctaattttataccggaagagagggattactactatgattgggaaagcactatacaataattcatggtttgaagttgcaaatatcaactttgactcagggcatatcataattaaaaacgacagtgaaaactcgttgggtttgagaataggtgaaacactgacacttgaccttgattacgtcgatgatgtaaaaattggacttttgctgtgaatgcataaaatgctgacttaatttgtaaagggaaattaaggttggggtcgtctgactttataggaggaataaaatgaatgaaatgttttggctacatcaatatgcaatatatttaaacaatcaaatttggtctttgcgagaatttggcaaacttgaaaacattagattagaacaagctgaagacattattgaatgcttacccaaaagcaaaattgctttagagtttgcaaacagtcagcaggtaaatttatcgctaaccaactaagagcatctgtgtctgaaataatgaaagaagaacctcataagtgtgagagggggaattaataatgagtatgcaaagaggagcaaatacaccggtggagttggctaaatcaattcagaaactcggaagggaaatgctagaatttagggactgtatcaatggtattcgtgaaattgttattactctagatgaagatgatgggtcatttacgattacaacagattaaaatgttgatttcatttagaaagggggacggggatggacgattatctacaaatacttaatgaggttaaaccgatagaaatgctattaacaacaaaagaattcactgttcagatgataagtgtttactacgaagttcctgaagatacaattaaatcagtacttaaaaggaacatgaaactccttaagcaatatgcagaaataagaacagttgaaatgaaaatattgaaacatgaatcagcaatttttaaatcagccagatttaaaaaagttagaaagttatcgttagtcaatatatacggtttccttaggataggcttacttttgcacaacagtatcatagcgagggaatttcagaaaaatgttaggcatcttgacctgccggaaaggctaacagatatcgtgatcgggagtgccgaatataaagcaaaagaaaagaagctgggtttatttatcagcacggcttttagtggcattttcagtatcgagcagcaagtaaaatgtggagcttattttattgattatgtaatagataaaaaggttgctatcgaatgtgatgaacacgggcataaatattactcaaaacataaggaattggaaagagaagaatacataaaaagaaatggatataaactaattagattcaatccagatagtgaggaatcaatttttaaactgatcaacagagtatttatggaatgtcaaactgcataaaatcggtcttttaaaaagaaaggaatgattttttgataacagtagttaaaggcgatattctaagtgcatctgaggatatcatttgtcatcaagtaaattgtcaaggagttatgggtgctggattggcgaagcaaatcaaagaaaagtatccatctgcatacagagtttataaatacatgtgcgacaacgtagtatacaagcctgacttgttaggaaaggttcgggagtgaaagagcatgacggaaagattattgcccatatcttcggacaactctcttatggaagagggagggtattcaccgactatgaagctttaaagtggggcttagagctaattaaaacctcagctatgacaaatagaagatccattgccttgccttatggaatcgggtgcggcttggcgggtggaaattggaatgatgtgaacaaaatgatcgaatccatcttcgaggactacgaagtgacaatttacaagttaggtcagaactaattttaggataaaaataaaataagatgattagggggtgagtagagatagctgaagaacttaaaacaattcaaatactgtacaacaaaatggaaagacaaatgagcacagttaaggaagctctcgagaacaaagaatacgaaagagcccaccgtaacctaatcaacctttcggataataatgaagaattgatgcaggaaatcagatggactcaaaaagggattaagatttaacttttcttctttctttatggttccattcgtacagctcttcaattgagcaaccaatggcatcggcaaaagtcatgcccgtagctaagttcatatttgctttagctccacttatataatcgtggatacgttgtctcgggtatcctgtgcgtttgaataggtcatcaactgtgaggccatattcaaacattaattcatttaaacgtgggcgtaggggtgtccattgcttcatttcgtacacttctttcaatattaattgacataaaacagtgtagcaaaggtttattttaatttcaattttgatttcaatattttaggagagtgattgattggcaggtacaaaccagggtaaggtttttgaagcaaatatagaaaaatcagctgcagatcaaaagctgttcttctacagaattaaagatgtaaatccagtgtttttaaaaaggggagctgcagtatcaaaaaacaaatatgactgctttctattctttaagggatacttgttcccctttgagcttaaatcaacaaaggataagtctgtatccttcagtgaaaagatcatcaagccacaacagattaaacacttaaaagaggctactcaatattcaaatgtaatccctgggtttctgtttcaatttagagagccagaaaataaagtttatttcgtacatattaatgatttccttacatataagaacatagctgaaaaacagttgaaacatagatataagaataaagtaaacaaagccagcattccaattgcaatttgcgaagagatcggcacagaaattcgttcgatgaagaaaaaagtaaactatacatattacttgaacaagctttgcgatgatttgattaaaaaagaacagcagagtgtgagcgctgtatgagtgagttcgttaaatcatcttcaaagcaatcgtttgaaatagaaaaatatcatataacgattgaaagcatgaatcaaccatcggctgaagcaattaagaaagtcaatttaaaagtgaatgaagtaatgtctaatttattagcaaaagaaaagagccattaatctggctctttttattgttgtacttaaactataatgcttgtgacgattatcgggatgaccttaatgccggtcgcgatgaatcatattgccggcggggaaggcagcaaggatttcggtgatccggctaaccttgccctcggatttacggtgctcgtcatcatcgtgctgctttatcggtttacaaaaggatttttgaaatccatttcgattttaatcggcattgtcatcgggacggccatcgcatattttatgggaaaagtgcaatttgacaatgtggcgaatgctgatgccattcaaatgattaaaccgttttacttcgggacgccgacatttcatgcggcaccgattattacgatgtccatcgttgccattgtcagccttgttgagtcaaccggcgtctatttcgctctcggtgatctgacaaaccggcgcctgtctgaacgtgatttagcaaaaggctaccgtgcggaaggcctggcggtattcatcagcggcatttttaatgcttttccgtacacggcttattcccaaaacgtcggcctcgtgcagctgacgggaattaagaaaaacacggttatcggtgtcacgggcgcacttttaatggtcttcggcctttttccgaaaatcgcagccttcacgaccatcatcccgtcttccgtactgggaggcgcgatggtggccatgttcggcatggtcatttcctacggcattaaaatgctcagtcaaattgactttaaaaagcaggaaaaccttctgattgtcgcgtgttcggtcggattgggactcggtgtaaccgtcgttcccgatatgtttaagcacctgccgtcttacttaaatctgctgaccacaaacggaatcgtcgccggaagctttaccgccgtccttttgaatattatttataatatgattcctaaaacgaaaaaaacccttgatgtgacaagggttcaagagggttagttatccgtctttcttaaaaaaataacattttaataacatttctttatgaaatcccgagatcgaggatgcttccgaaagtttgctgaactttttgtgaggcatcctctttcatttattattttcattgtttgaaaagaaacaaattgagtgatgaggcatccgccttatttcggccgaaaaaccgtcccggactatatgtacgtgaacgagtatcttgtgcacggatccttacaaatgagagtgaaaagaagggaaagccccttcttttaattaatccatccttcaaaagttgcgcgatagaacccttcgattatctctactttcttaaggtaatatgtaacaccattcttaacagttgtatttgggatatcccatctatgaaggtaatccattgtaaaagaatctttggtcgcttgtgtcgaaatttttgtttgagttgagtcgctatttgtatgaccagggctagatgcaaaagcaggggcagcggaaacgagtaaagcgagagacaaggcagaaccagttaaaactttttttaatttcattttgaacactcctttgttttttaatacacttgtattattacatacaatacaaaaataaccaagggtttttttgttaatattttgtgagcgtgaatgtagttaggggcagtcctttcattcactattgcggcttatttcagaatattgataagtatatagagaaaaagagttgaatattgctggcttctggtgaactttagatatttcaatgcttttccaacggggaagatgtgatagtaacttaatcaattgtacaaaagtaaaaactttatttaaaatgttataaatacggattttcaatataggaggttatctgatggcagaaaagaaaaaagctttaatcattgtggatgtacaaaaagcctttgatgataaaaagtggggagaccgaaataacgtaaaggcggaagaaaatatcagcaaaatactgaaattatggagagaaaaaggatggacagtcatatacatacaacatatttctgataaatctggttctttattttatccaaaaaatgagggggtcgctataaaggaaatcgttaaacctatggataaagaagtcattataaccaagaaagtaaacagcagctttattgggactaatctagaagagctcttaaaagcaaatgatataacaactgtcgtaatcactggcttgactacgccgcactgtgtttcaacaaccacaaggatgagcggtaatttaggatttgatacatacctgatttcagatgcaacagcagctttcggaatgagagaccaaaatgatacatattatgatgcagagactattcacaatatatctctggccacgttgcatgatgaatttgccacaatattaacgactgatcaattaatcaatgattttataaaaacaaactgattaacattatggctaaggccggcggtagggataggcggctgaaattcaggcgcatacaaggacctcttcggaaaatacgggggttgccgactcttttcatcgtcgcaatatcgattgaaaaaaggcatctgcttcagatgctttttttgtttcttgtaaaccggtttcggtaaaaaatgacggttaacggtctgattcggtttcggttttgaataacaaaaggctttactaatcagcgaattattcagtgctgagtctggtgttttttgatttcctcgaatagattggcttgatcatctttttgaggctgaggctctttgttatgacattttggatcgatcacatttttaaggtctttgatggttaaaggcttacagtcatcttttaattcgtaacctaattgtccattagcttctaaagtggcatatttaattgtgtttatatttgaaatgccaagaagtcttaaacgcatttcgagttgatctgctgtcagtctcagcttctttaagttttctatattgagttggccgtcttctataacgaatttagattttccggttaaaaagattcaatccagtttacttttacttgaaaccattccatcaaaatcaaagcgctaaaaaggatagacgcagcgattaatgttttcaataaactggtttctaaaatggggtgaacgataatcgtaccgattgaaatcatcaccattgtctgtgcaatggtcatttgtgcagtggattttctccctgaaattctcagtaagatcattccgaatacaattataattaattcttcccaagcaaatctcatgttatcaccctgggttgtgttttatcaaaaataaaagagcaagtaagaggttttatggggtacttgctcacgaagaattattgcccttacatttgataactaaagaggggaggaaaaacattccatggccttttgtttacgtcagcatatatcaagaatagagttaccttaacatgagctggggaactcaagcgtccatagaaatgttctgaaggatctggattgattcttcgtaaagagttgaggctcggcttttggatagacatgtgattcactaaagtgctgcaggatccgatcaaaaaacctatggcaggagagaattttagattatgtgtttttgcgtctaaaagcagaaaacagtacgactgataatgatcatcgggtgaaatgaaattacgcacctaggtgctgtatgttggatcaattataaaaggaagtgaaactagaaaaaggggcaaagcccccttcatattagtaacagcgctcatcattcccataccagattccgttccggaaagaaactccttttagataccaattgttgatatcgtccagcagttgcaaaagcagaaggtgctgatacaagtagagcaagagataattcagaatctgtcacaatttttaattttgacactttttaggtacatgttagcaatcatttattctcttatcggcacggtaacatacggattatttttagttgttgcttagaacaaacattccgcgtcatgaaaaatcagcttttgtagacggctgtccaagtgccatcagcaccatggaaggtgatgttgtctaaataataggtgattccattccggtaaattgaagtaggataatcagggccggaaccattaagtatgaacgtcgccaaagcagatacttccttcgttttactttctgcagaaggtgtatcagcaggacctgcggcaaaagcaggggcggcagaacagagtaaagcgagtgatagggctgagccggctaaagcttttttcattttcattgtaaacactccttttctttttttaatacaattgtattattacatattatgttaaatatgtacatgtttatctttgttaattttttgtgaacaaacagataatctatttaaacgcagagatgaaataagtatgatgatgaagcaattatcatctataaatataagatcaggaagtggctgattttctcgaaaatcatctgctcttgcgaaatgaggagttacatgacatttacggaacgggcggtagccattatcaaacagattcctgaaggaaaagtgatgacgtacggtcaaattgccggtcttgcgggaagtccgcggggagcgaggcaggttgtgaggattcttcactccatgagtaaaaagcatcgtcttccttggcacagggtcatcaatgcaaagggtgaaatcggattaagagatgaagagatgttttctgtacagaagctgtctcttgaagctgagggcgtagcggtcacgtcagacggacggatcgatctcaatttatacgtccatgatccgaatatgtaaaaaacctgccgtatatatcggcaggtttttcagttatatgctgcgagccggccagaaaggttttgccggatataaggccattcctcccgaaggatggagtagtaggcggtatctctgaggccgccgtcgacagccggaatatgcgcgcggcggattccttcaaattgggcaccgatccgcaaaatcgcagttcgtgagcgctggttgcgaacatcggttttcagcgtcaccctgacagcttgccacgcgtcaaacgcatgggtcagcaacagaagtttacattccgtattcacaccggtccgctgtacggcagaggcataccatgtgctgccgatctcacacatttccggggctgcgtccgccggccgcgtaaaaacttccgcatccataaaccgcgtgcttccgacgattcggtctgtttcaagactccgtactgcaaatggcaatgcaagtcctttttcataatcggaaagcgcacgttcaatataacgctttgtttcttcgattccgtcaggaacatgggtgtaagcgtaagtcgtcctatttcccgaagcagcttcacaaagtgcctgagtgtgatcaatcgtcatcggctctaactgaacgagtgaccctttaagaatgacgggcttcagcattcttatcacaaccttttttcatgaatgggtcaagtatagtcgaacggcttatcattcaaaagggccaattttaaattaaaatggcatgtcagtgaaatcctcgattcaaacttatgcatacattcaggaaaaaagcggaaacctttatgtgaagaggtgatgggcatggcatatgtgttgtcggtcggaacgagcattccggaatatcatgtctcgcaagaaacggcggcggattttgcgagagggatgtttgccgattcatttaaggatattgatcggctgttaaaagcctttcaaaacggcgaaattgaatcaaggcagtttgtccggccgattgaatggtataaaacggcgcggggtttttcagaaaagaaccgcctgtatacggaagaaaccgttaagcatagtgcggatgcggcgcttgattgtttaacaaacccggattgtttaacaaatcccttcccatatgaaaaagtggatgcgatcttttttatttccagcaccgggctttcgacacccagcattgaagcgaaagtgatgaatcagctgccgttttctgcgaaaacaaaacggataccgatctggggcttaggatgcgcgggcggagcggccggcctgtccagggcgtacgaatactgccgtgcgtatcctgaagcatacgtgcttgtcatcgcggctgaactctgcagcttaacctttcagccgaacgacaagtcaaaaagcaacttgatcggaacttccctgtttgcggacggaattgccgcagtactaatcggaggggaaaaggcgaaccgaaacgacgtcaaacagccgcttcttccgcggatatttgccactcaatcggtgatgatgccggatgcggaagatgtgatgggctgggaattcaccgacagcggttttcaagtcattttttcaagagatattcccaccctggtttcacagtggctgaaggacaatattgatgaatttttattagaatatggtgtcggtcctcacgacattaaaacctttcttgcccatccaggcgggaaaaaggtcattgacgcctatttaacgagtctttcaatggacatcggtcagcttgcggcatctcggaaggtgctgcaaaaacacggcaacatgtcttccgcaactatttttcacgtgataaaagaacagttgctccgcggacggcagaaagaaaacgaaaaagggttgatcggcgctctcgggccgggattttcgtctgagcttttgctgttcagctgggaaaagggggcttcttaatgttttggctgtttatcatgctgcttgcggcccagcggattgcggagatgatcgtggcccggcgcaatgagcaaaaggtgaaaaagcaaggcgcagtcgaatacggagaaggacattatccctttctcgtcctgatgcacgtgctctttttcgtctctcttacagctgaggtggcggcgtttcaaaaaacgctttctccaaggtgggccgccattatatgtattattttatttgtacaggggatcaggtattgggcgctattatcattagggcggtattggaatacgaaaatccttgtcgtgccggatgcggagcttgtcagaaaggggccgtacaggtggatgaagcacccgaactacgcggtcgtcatcttagaatttatttttctgccgctgttatacggagcgtattggacactgtttctcttttcgattctcaatgcctgcatgctcactgtgaggattcgcgccgaagagaaagcgctagaagaaaacaccgcaaaatagagattgaaaatcattctcactcatgataagatgtaaatatgaaaatgattctcattcaaggtggtgccgaaaatgacaatgttatttttatttgcagccgtttgtacatacagtgttttaattggtttcgtattgaaaaaagtttcgaataaatcgatgtcttcttaaacatctgcggtttttcctgccgcgggtgttttttctttatcagctgccgatatcggcggcttttttgcgtttcctgaagaaaagtgagccattcttgtgtaaaatgggggagaggtttttttcagagctttctaaaaatgaaaaacgtcatttgatgcgacagacacaaaggggtaaagacacatgacagaagaagaacgccataacagggagattttcagcagaacgggtgccttatacgcacaatttttggatcatcaggatgaaaaacgggccgatcagctcgcggccattatgaaaaaagcggctgatgaagaggtttatatcgcgtttaccgggcattattcggccggaaagtcctctttattaaacacattgctcggtgaagacatactgccgacaagcccgattcccacaagcgccaacctcgttgtcattcggcacggtgaagataaagtcgtgcttcatacgacggggggggcttatgcagaaattaaaggaagttacgataaagaacaagtgcagcaattctgtaaagacggtgagcaaattgaaacggtggaagtctatgccggctttaaggagtcagagccttatgcggcctacattgacacaccgggaattgattcgacggacgaagcgcactttttatctgccgcttcggttctccatcaggctgatgctttattttacgtcgttcattataatcacgttcattcagaagaaaatatgctgtttctcagctccatcaaagaccgtattccgaatttgtttctgatcgtcaaccaaattgataggcatgatgaaaccgaaacgaagtttgaagagtaccgcaggcaggtggaagatatgcttgaaggcgcaggaataccgaaagaatcgcttttctttacgtctgtcactgagcctgaccatcctttaaacggcatggaacagctgaaaaaacatctgcagaagctgaaacagcaggcaaaaacaaatttatggtccttaacggagagaaaagttgcacacttagtcaaagagcatacagagatgctcgtaaaagatgataaaaacggcagcggagagcagtttgacaaacaagaagcacttgtccgttctgttgaagatgagcttaaaaaagccgttcaacaggctgaaatagcagagaaagacatcagaaaagacgtgcagaacatattgcaaaacgctaatctgacaccctttgagatgagggagcttgcatctgcttatattgaatcacagcagccctcatttaaaaccggattattcttttcaaaagcgaaaacggcttcggaaaaagaaagaaggcatgctgaattttttgccgatattaaaaaaagaacggaaggggaagcggattggcatattatcgacacatttacgaaagcggccaagcggtatgaagcggattcggacgaactgatcaagaaaatccaggcgtaccgcacaccgctttctgatgatatcaccgctcaggcccttaagcagggagcggccttttcatctgaatacgtattaacttatacgaaagacctcgctgaaatgatcagaagggaagccaaaagacagacagcggaactcattgaggagctgaccgcttatgttcagacaaaaaacggaccgctcattgagaacttgaaaaaccggctcgaaaaagaaaagaaaataagggatgagctcgcgcaatcggcaaaagaagaacgcaatgccttggaaaaagcagcccgcgtccgcgctttgtgggaagaagaattgacctgtgatacgggaagcggcgactggtatacgcgaaaaaaacgccttgcgaaagtgcccgtccaaaaagagaaaccaaaagaggctgtacagcatgaagtaagcaagcccgaaaaaaatgcgatgaaggaactccctataaaagagcagactgatcggttctatgagcttgccgggattcttgaatcctcgaacatattaggaaaacaggcagaagcctttcgaagcaggattgagcggcttgaaaaccgccagtttaccttggcgttattcggcggattcagttccggtaaatcatcatttgcaaatgcgctggtcggtgaatacgtgcttccgtcatcaccgacgcccacaacggctacgatcaacaaaataacgaaaccgcaagacggcaaaccgcataaatctgcggagatcgtttttaaaacggaagaggagctggatgctgaaatgcttcagctgactgagctgaaagacgctgacgtaaaggggcgttcactgaaagagagatggaattatgccattaaaaagggaaaaattccggatgaactcatcccggtgattcagacgatgctgcaggcgtttgatgcgtatgaagaacagatccgtcaaaggctgacactgtcggtgccggttgaagatttaaaaccgtacgcagccgaagaaaaaacggcctgctgcgtaaaagaagtcaccgtgtattatgattcgcctctcacgcaaaaaggcatcaccattgttgatacgccgggagcaagcagtataaacaagcgccatacggaacttgcctttcaatatataaaagatgctgacgcgttcttttatatgacgtactatcagcattctttttcaaaaggagacaggtcctttctgaagaaactcggcctcgtcaaagaatcattcggcatggataaaatgttttttgtcattaacgccgccgatctggccaaaaccgaaagcgaactggaaaccgtcaaagactatgtccgctcagaactctcaaaagaggggattaaccggccgaaattatatcatgtctcaagtaaagaagagcttgcgggtaaaaaagcagctttttataacaggttctctgatgtaagaaccgggcttgagcactttattgaggaagatgtaatgagggccagctgcgcccagctgaaaacagaggcggacaaattgtgcgatatggtggaacagcttcacgaatctcttcaccagtcggcagaagaaaaagagaaaaagaaacagcgtctggagttctcctatgaaaaagctctcgctgacatttcaaagcgccgtacgtctgaggtcatcattcgaaaagtgatgaaagatacggaagaacagctctaccacattaaacatcgcctgacgttttatgcgaatgatatgctgaaaaccgccttccatccgggtcttcaaaacggtgattggaaacgaaatatatcagcggcgctgaatgaagcgctcaaggaattccgttttgaatatattcaagagctgaaaacgctcgatatccgaatgaccggttttattgagcgccatatgactgaggaatggatggaaaactgtcagaagaagcttatggaagacggagatttctccatttatgtgagcggcgaaaacgaatttgccgttcagctgaaagaggtcgctccggtcattgacgtctcggcattctcacatcacgtaaaggaagttaaatcaccgaagcagttttttgaacagaacggaaaagcagcgtttgtagaagggctcaggctgagcctgcaaaaagtgacagaaaagtggcttgagcaggagaaagaaagcctttcagagcgatatgctgagcaggtgcgccgtctgcaagaagacatggcggataaaagcctgtcccagatccgcgagcagcgggacacttatttacaaggtcttgcggaaaatacgagtgcaagggaaattgaacacctttatgaagccgaaaaagcatggaaaaagaaagatgaaatgctgaaaatttaaaaatccggttggcgggcagataacagtcgtggtagactaaaatgaaaaaaagcgagatgaaaccttttatgtcagaagtccataaagcaatttcagcacattccgcaaaacagcatcagcacgtcaaaacatttgtacagcttgattatgagcgtgaacaggccattgaagaagccattgtaaaatgcagacagaataaaccgttcacgacagatgccatcaatggcatcaccgcaaaaatgaaccagctggcgaaaaagggcatcgtgccgcaaagacaattcgtaagtgaagagatggtgaaagaattcgtcagcagacagtaatggatgaacctgccgcgtgtgtcatcagcgcttgctgtacatactatccgtatcttctctaaagggggatatgaccatgggcagaacaaaactgggaaacagaaatgctcagcagaataacaatgccaaaaagaaaaacggcttcggacagaaatttgattcttatgccggccgtgaagctgaaaagctgatggcaagcaataaaagacacggtgagtaaacgtgacggcagcatcttccaaatggggggatgctgtttttttaccgccttctttggtaaaataggaacattgaataaaaaaggagtttcgatatatgaataataaattactgctcgttgacggcatggcgcttttgttccgctcgtttttcgcgacggccgttcatcgcaattttatgataaatgaaaacggaattcccacaaacggagtcaacggttttttaaagcatcttattacggctgttgatacgtttcagcccacacatgtcgtctgctgctgggatatgggaagcaaaacgtaccgcaatgatttgtttcaagattataaggccaacagaagcgaaccgccgctagagctgattccgcaatttgatctagcgaaagaagcagcgcgagagctcggttttttaaacatcggcataaaaggctatgaggcggatgactgtatcggtacgctttctgccctattttccggggaagcggaaattacgattgtaacgggtgataaagatctgcttcaattgctgaatcatcaagttcaagtagcgctgctgcaaaagggtatcggtaattataaggtatatacagatgagatattcagagaagaaacgggagttcctccaaaagcgctgattgacattaaggcgctgatgggagacacgagcgataactatcccggcgttaaagggatcggggaaaaaacggcgtacaagctgatccgtgaatatcaaaacatagaccggttattagaaagcctcgctctcttgccgaagggccagcaaacgaaaattcagcaaagcttgaaagaattggagctgtcaaggcagcttgctgaaatacattgcgaggtgccgttagtctgtacgcttgaagaagcgcttttttcattaaagatggaagaggcggcattaatgctcagacgtcatcagataaaaggaattgaaaggatgctcgaaaagctgaacgccagagagatcagctgatccctctagcgttttgtattgcttttttttgcgttgttttcaagggctgatttcgggtctttatgcgcatttccttccatatttccctgaggatttacgcccctggtcagccggcctttattttcttttctcatagctgttcacctcatttgtaggatgaacagtgagacgcaatttcattccggttatttattcagccgaatcgctttttttgcaagctgatcggctgtttggttttgtctgccgggaatccacttaatgaaaaacaatggaaatccggcctttaagcggatgatttcgtcaacaaacggctggaaagccttgtttttaaccgcttcaagatctgcggcccgctccacgatatccgaatccgtccggaatgacacggactcaaatccgcgggcggcacacagcttcattccttcaattaaagcgagaaattcagcttcctgatttgaatggtcgccgatcggaattgagaaagattctgttttcccgtcatgtttaataaaaataccgataccggacgggcccgggtttccggcgcttgcaccgtccacgtaaatttcagcgggcatcatccgtcactctcccttcggtgtcattcgttttgccgcatacgcataagggacagaaatgagtgataccgcaaatttaatcaggtaagttgaaatgaagatgctgaaccatacgcccgcggaataaacgccgataaaggccacggcagtgaagataaatgtatccagcagttggctgagcgccgtgcttccgctgtttctgagccagagaagcctgtctgaaggaaagattctccgaatggctgaatatacataaacatctatcgtttggctgaaaataaaagccaagaggcttccgagcgcaacacgcggcagaaaaccgaaaatcgtctcaagggccggctgtgcgatatctgacgcagccggtttatataaaagagctccctgcatggcgcatgtcaaagcgagcagagtggaaaacccgagccagacggctttgcgcgcttctctgggaccgtatttttcattcagcacatccgttgcgaagaaaacggtgccgtacatgatatttcccagtgtcgccgtaagcccgaacagctcgactgttttgacaacctgcaagttggcgcacaccgtggcgaaaccgatccatacgaataggcccgttttgccaaatcctttataaaacagaagaacaatgataaaatgaatgaccgcaaataagatccataacacatcgttaaacaaaacctgctgacttcctttcaatttgagaatggtttgattatagcacacgcccgtcaactaatgaatggtaaggtgatttcaatgaatcttaagccgtatatcgaaatagaagcaaaaggaacaggccctgtcgcgtttttttccgaagattggctgaccgttccgaaagcgcgcatgcttgcaagagaagtcagccgctttccttatataaaagacatttattttgaggatgaaaaaggcgcgagctggacgcttaaagaattagaaaagcttactgaagagcttgcgcacgaacctgacgacattacagtgtatttcgacggcggctttgacaaaacaagcgggcgcgccggactcggaattgtcgtgtattattctctcggcggcaagcggcaccgcatacggaaaaacaaaagcttaacgcttcagacgaacaatgaggcggaatatgccgctttgtacgaagcccttaaggaagtgcaggaacttggcgcaagcagaaattcaatcacgataagaggggattccctcgtcgttgtgcatcagcttgacggcagctggccgtgctatgatgaaacgcaaaacgaatggctggataaaattgaagcgctgcttgaatccttaaagctgacaccgacatatgaagccgtaaaccgaaaggaaaatcaagaagcggatgaccttgccagaaaaattctctcggaccggcagattgaaagccgcataacattagaaggtaacggagatgactgatattggataaaaaaagcatttataaagaattgactgagcttcaggatgaatattgcaaagactgtttcgtaaaaaagcattttcgcaaagagtttggaaaaacgcacgctcattctttctgcatcaaccaatgcacggtgggggagaagctgaaagcctacggcaaggtgctggcaaatcaataaaaaataaaaccgcagtttctgcggttttatttttcgaattcatcgagctgatgctgacaatcgtcgagaagcattcgctgcttttgcagaaaatcctggtcgagagcttgcagttcactggattgtgacatcgttctggcatcctgaatcgcctggtaagcagattccaccaaagttgaattttggccccgggttgccgctcccgttgttttctgggccgtttctaccgctaattcaagctggcgtttatccgtcagtccgtttggaaaaaattcagagtccattaaaaaacacctccgcaaatagtttggagtttttttttagaaatatgtacggaaaatagaaaaaatatataaaataagccgatataactattgaacctgattaattagggcttatttactattattcagggtatcttgggagagaagggaaaaaaccagccgtgaatgataaagatttaaaaacaatccttcagcagacatttaaagaaatatacggtgatttgggaagtttagcggaaatggcaaaaaaaggaatgccgtcaatggagaaacaaattgaagaaatcgagcagcgctgcaagcagaatcttgtcgcaattgagattcagacggcaatcaaataggagaggcatacgcctctcctctatttgtcatctgatcaacatgtattgagtttagagttttacaacattagaagcttgaggtccacgattaccttcgacaatttcaaaagaaacttcttgtccttcttctaatgatttgtatccttctccttcgatagcagtgaagtgaacaaatacgtcgtctccgccttcaacttcgatgaagccgaatcctttttcgttattgaaccattttactttaccgttttgcatattgcttaattcctcctagtactgtagcaccttcgtgctaaaaaaaattttgtcatcatccaaccgtacgtatgtaaacgttgttaaatgatggttcaactatacaccatatgggagcggacgtcaagcggccgctccctattttttatctttatttttccagtaacaaagcttaaccggaaaaaaacaaaaagcacacgaatcgttcgtgtgcttttcttttacgataatgccatatccgccttcccggccatcatttcagattcttttataatgtcctgcaaaatgacttcagaagagttggggaggtgaaggcttttaatattgtccttcatccggttcagcttctcctcatccgcaagaagggaggtgaccgactctaaaatttcttcgtggcggttgaccacgacagccgcaccgcgatcttcaaagaaaatggcgttttctttttcctgtccgggaaccggtttgtacaaaataacgggtactccgatcgccgttgcttccgtcagtgtgatgccgcccggtttcgtgatcatgcagtccgtaatacggaacagctcgtcaattctttctacatagcccagaactttcagccggtcggcattgtcaccttccaagctgctgagggattctttcagtgagctgtttttgccgcataccaccacaacctgcacctgatcgtcatgaacgagattttcgcacagttcttttacgtttttcagcacaccatgcgctcccgccataataagaagaacttttttgtcgggagagagattgtattttttataaatcggctctttcggcatcgattcctcgaattgaggcctgatgggaatgcccgtgatctttacgttgttcgggtgagtgccgatttcaatcagtttttccttcacgtaatctgtggcgacataatatttatcaacattttcatgaacccagattttgtgaaggcagaaatcggtcataacgttaaacgtcgggatcacttttccggttctccgtctgtattccggtacgacaatcatcggaaatgtattgataataatgtccggcttatgctcttcgacgagctggcctaaacgtttatttcccattttaaaataaatattgaatttgcgtttattatagattttgtcaactccgtaataaaacaaacgataaaactgtttcccgattgagaagctttttaaataaaggtattgagtaacctctgaaacaatcggatttgactcttgatacaaattagaaaccgtcacatctaagccgagacgcagacactgttcgtagagcgttttggccacttgaacatgcccgtttccgtaatttgcagtcaaaattaatacttttttattggtattcaagtaaattcacctcaatgtaatcaacaacaagcaagcttcatgcatcgtaaggagttattgtctatagataaacataacacaagtgcatcattttataataagtgcggcaacatatttaaactaaatttaattgatatgttccattattttaaagttttgttatacgcatactgaatcaagagtattttatcatatttttgtcaccgtatcactcaaaacaaaaattaatcccattcatacggggtttcctgatatacgtaataattcagccaattcataaacaataacgttgcatgagctttccagcggttaacaggttctttcccgccgggcgcaaaatagtgcttaggagcttctacgtttgaaagatttctctctatgtctctctcatactcctgaagtagcgtatcggtatcatattccggatgacccgttaagaaaatctgtttttcgtcttttgaaacgattaaacagaccccagcttcctctgaaacgctgagcacatccagatccgaagccgattgcagctgttccgtattaatatctgtatgccgtgagtggggcacatagtatagctcgtcaaatcctcttaccaatctctcatgttttttaagaacggtatgctcaaacacaccgaagattttcttcggcagctccactttctcaatgccgtaatgatagtataaaccggcttgagcgccccagcagatatggagggttgaagtgacattcgttttgctccattccatgatttccttcaattcttcccagtaagaaacatcttcaaacggcaggtgctcaatcggagccccggtaataatcattccgtcaaaccgtttgtggcggatgctggaaaaatccgtataaaattcatccagatgctgccttgccgtattttttggagtatgtgtgctcggaattaagaacgtaaagtgaacttgtaaaggtgaattcccaagcatcctgaggagctgggtttccgtttggatttttttcggcatcagatttaaaatcacgatcttctgcggccggatatcctgatgaaaagcccggctttcatccattacaaagatgtgttcactttcaagcacctgcttagcgggcaggtgatttggtatattaataggcaacatgccacctccgttattccccgttaattttcttcattatagaaatttttaagccatttttcaatccatcccggcgtaataaaccgcatttaacgcataatgacagggataaaagcggcaaatgggcataaattcggagcggctctttattatgacgggtaaagagccgtttggttcctcgaaaaaaacgttttccgttaagtggaaggaaaaagcggttgccgtttgttttgcagtgtaaaacaggtaaaataaatggagaatgtaaaaaggaggccgcagatgacaatttacgatataaacgtacggaccataacaggcgaagacatgacgctatcggcttacagaggcaaggtgatgatcattgtgaatacagcaagcaaatgcgggttcacatcccagctcaagcagcttcaggagctctatgatacatatcgggaggaaggtcttgaaatattaggatttccctgcaaccaattcatgaaccaagaacctggaaacgaagcggaaattcaagagttctgtgtgaaaaactacggagtcacattcccgatgtttgcgaaagttgatgtcaatggagcagacgctcatcctctcttcacatatctgacggagcaggcgaaggggatgctcggcacaaaagcggtcaaatggaatttcactaagtttatcgtggaccgaaacggtgaagtcaccgggcgtttttcaccgaacgtcaacccaaaagaacttgaagatacggtgcagaggcttttggcccgataagaggtgatacggtgaacgaaaaagagcagctggaaagcgtcaggaattgggtcagagaaaagcttatcaatgaacgaacgggccatgactggcttcatatttcccgggtcgcaaaactttctgtgtacattgcaaaagaagaaggcgccgacttatttgtcactgagacggccgcgctggttcatgatctgattgacgccaagctcgaaaaaagcgaaaggctgacggcaggcgaagtgacagaacggctggctgctttcaacatcgcggctggctccattcaggagatcacggatattatcacgagaatgtcattcagacacagggaactgctgataaagcggccgctttcattggaggggaaagttgttcaggatgcagacatgcttgatgcgatcggcgcagcgggcatcggcagggcttttatgtttgccggcgcgaagggtcatccgatgtacggaactcaaacaagtgtgctggcccatatagaggataaattaatcaagcttaaaggcttaatgaatacaaaagcgggggccggtttagcagaggagcggcatcaatttcttttgcagttcgccgcccgtatccaaaaagaggccggcatttgcaaaagctaagcggcgcaatagaacgcttgtgccgactatgttagaataagtgtcagattgcgcataggaggaccaatatgaagattaaatcaatagaaccgacgccgagtccgaacacgatgaaagtgattttgactgaagagcttccggcagggaaaagcaacaattacaagcccgatcaggcagatgatgctccggttgtcgtacgtgatattttaaacattgaaggagtaaagggcgtttatcacgttgccgatttcctggctgtggagagaaacgcacgttttgactggaaggaaattctgcctcaggtccgttccgctttcggaatggaacatacggagcagtctgagagccgttctgaacaggaatcgttcggtgaagtgaaggttttcgtacaaatgttcagcggaatcccgatgcaggtcaaattgacggacggcgaacgtgaagaacgcttcggccttccggaacgtttccaagaagccattttaaagctgcgttccgaagcttcaaatgttgtatttgagcggacttggaaagaacaaggcgtgcgcttcggagattttaccgaaatcggacacgatgtcacagaagagcttcaggccgcctacagtgatgagcggctcaaacgcctgacagaagcagccgcacagcaaaagggtgaggccaaacctgcagtgcagcggaaagcttataaagtgacactggacatgcttgatgatgaagactggaaacagcgctatgcccatcttgagcaaatggatccggatgaagacgatttaccagtattggaaaaggcgctgcatgatccgaagacttcgatcagaagacaagccgtcgtttatttgggaatgatcgaaaagccgtctgtgcttccgctgttatacaaagcgcttgaagacaaaacggtgacggtcagaaggacggcgggtgactgtctgtcggatctcggcgatgcgagcgccatcccggccatgataaaatcgctcagtgactcaagtaagctcgtgcgctggcgcgcggccatgtttttatatgaagtcggcgatgaaagcgcgctggaagcattaaaagcggcggaagacgatccggaattcgaagtcagcctgcaagtcaaaatggcgattgaacggattgagcacggagaagaggcgaaaggttcagtctggaaacagatgactgaaagcagaaaaaaagaacagttataacaaaaaggtgcgccatgcaccttttttatttgaattcactttttataaaaattatttagaatattgttgaaaaatgattcaaaactctatatagtaagtacaatattaattgttggagggtttttatcgaaatacagaaagaatagaaaaagcgagacagggcaaagacactgtaaaatttgcagaacgcgccctagaataaactgaaaattttaaaaatagtgcacagtctaaaaacagtagggggatcaccatggcagaattacgcagcaacatgatcacacagggaattgacagagcgccgcaccgcagccttcttcgcgctgccggcgtaaaagaagaagacttcggcaagccgtttatcgcggtctgtaattcatacatcgatatcgttcccgggcatgttcacctgcaggaatttggaaaaatcgtaaaagaagcaatcagggaagcgggcggtgtgccttttgaatttaacacgatcggagtagatgacggaatcgcgatggggcatatcggcatgagatattcgctgccgagccgcgaaatcattgccgattcagttgaaacggtcgtctcggcgcactggtttgacggaatggtctgcattccgaactgcgacaaaattacgccgggaatgctgatggcggctatgcggattaatattccgaccatttttgtcagcggggggccgatggcagccggccgcacaagcgacggccgcaaaatttcgctttcttcagtatttgaaggcgtcggcgcatatcaagccgggaaaatcggtgaaagcgacctgcaggagctggaacagttcggctgcccgacgtgcggatcttgttcgggcatgtttacggcaaactccatgaactgtctgtctgaagcgctcggtctggcgcttccgggcaacggaacaattcttgcaacttcaccggaaagaagagagtttgtgagaaaatcagcggcccaattgatggagaccatcaaaaaagacattaagccgcgcgatatcgtcaccgaaaaagcgattgacaacgcatttgcgttagacatggctctcggcggctcaaccaacacagtgctacatacgcttgcgcttgccaatgaagctggagttgagtactctttagaacgcattaacgaagtggctgaacgagtgcctcacttatcgaaattggcgccggcctcggacgtcttcattgaagatctgcacgaagcgggcggagtctcggcggcccttaatgaattagcgaaaaaagaaggggcgcttcatcttgacgcgctgactgtaacaggccgcacactcggagaaacaattgcgggtcatgaagtaaaggattatgacgtgattcatccgcttgacaatccgtttaccgaaaaaggcggtttggccgtcctgtttgggaatctggctccggacggcgccattataaaaacaggcggggtgcaggacgggattacaagacatgaaggtcccgctgtcgtctttgattcccaggatgccgcgcttgaaggcattataaaccgcaaagtaaaagaaggagatgttgtcattatccgttatgaagggccaaagggcggaccgggcatgccggagatgctcgctccgacgtctcagattgtcggaatggggcttggcccgaaagtggcgcttattacagacggccgtttttcaggagcgtcccgaggcctttcaattgggcacgtatcgcctgaagcggctgaaggtggcccgctcgcattcgtagaaaacggcgaccatgtcatcgttgacatagaaaaacggattttggacgtacaagtgcctgaagaagaatgggaaaaacgcaaggccgaatggaaaggcttcgagccgaaagtaaaaacaggatatctagcccggtattccaaactcgtaacaagcgccaatacaggcggaatcatgaaaatataaaacagaggcctgaacaattgaattccggccccctctatagtatccttgacttcatataaggattttagagggggcttttttatgtcaatggcttatgaagaatatatgcgacagctggtcgtgccgatgcgccgtgagctgacgggtgcgggttttcaggaattaacgactgctgaagaagtagaaagctttatggaacaggcagagggcacgacattggtcgttgtcaactccgtgtgcggctgtgcagccggtcttgcccgtccggctgcgactcaggctgttttacagcatgaaaaagcgcctgatcatacggttaccgtatttgccggtcaagataaagacgcaactgcaaaaatgcgtgaatactttacagggcaggaaccttcctcgccatcaatggcgctgttaaaagggaaaaaggtcgttcattttattccccgtcacgaaatcgaagggcatgacatggaggaaattatgaaaaatttgacggatgccttcgatgcgcactgctgacatgcccgaattccgggcattttctttttggagaaaaagatgatcacaacgagttaccgaccaagcgaatatacgatacacacagcgcagtcgctcagtgtcaagctgggtgagacttactgcagccgcaataaacagcccattgaaaaaatgctggaacgagcggctagcgattttttagtcatcggaaaggaacggttcgaactttacacgaagcaaggggagaagttcttttttcacccgaatacagcgatgttccgcgctaagcggtttttgagaggggaagccgagccgttgttaaaagcagccggattacgcgaaggggattcctttttagattgtacgctcggcctggcatccgatgcgattttggcaagcctggcagtcggaaaaagcggacaagtcatcggcctggagaaaaacaagcttgtctcattgcttgttgaaacaggacttcaaacgtgggaaaccggaatggagcagctccaaaccgccatgaaacgcattcaggtcaaacatgccgactgcgccgattatttgcgggagcttcctgattcatcggtagatgtcatttattttgacccgatgtttcacgaacctgttgaaacgtcagacggcattgcaccgctccgcgcgctggcagaagagggttttaacgaagagtgcatcacgcaagccgtccgcgcggcgaaaaaatgcgtagtgcttaaagaccattggaaaagcccgcggtttgaacgatacggcttcaaggtgctgaaaagaaagacggcgcttttccacttcggtgtcatccatgtaagctcatgatatcatgggcttctttttcgttaatcagtgatttccataacgacaaaataaagcagcgtgagaagtgatactgtcgcaaataaagcgttaatcatctcatcccctcctttttctccttcttattgtaagcggtttatccgctcggtcacagttaccaatttcccatattgcatgataatacgctgccggacatgacgccgcgctttcatctatgctaaaataaatgaaaagaggacaataaaacagaggggaacaatctgtcatgaaattgtggatgaaaaagacccttgtggttctgtttaccattgtaacattcggactcgtgtctcctccggctgctttgatgacagacaagccttcaggacagtcgagcagtcttgagcagaatgattacaccgctttttatgatgaacacgccctgccgggagaagagaaggcagggcgggagcctgaattactgtttcaatcgtatcagcagcagcttctcggtgatgctgaaaatcaatcatttttaaaattcggcagcaaaatttctccggtcattgaagatgattacagaagtgaaattctgccgaaaatcgaagatgtgatcacaggacatttagccaagtttcaagatgatgaagcgtatcaggatgtggttatttccagcaaaccgtcggccggaaaaactgaaaaaatttttcatgtgtataacaggctgacgggtgaagatcttttaaggttccacgtccgccgggatcatcccccgcaagacggctactggtttaattttcattaccataccgctgaagacggatttcagtcacatcatgagctcggcagcatttactgggaccgcaatacgccgcctgactggatgagcgtgtaatagcgagaagaaataaaaaaatcatttctgagaaattttgcagaaatgattttttattgtgttacactactaaaagactactttaaaaggatgaaaaaaaatgaaacaatataaagatttgtgccgtcatgtgttagaaaacggagaaaaaaaaggagaccgtacgggaacgggtacgatcagcacgttcggctaccaaatgcggtttaaccttcaggaaggtttcccgatgcttacgacgaaaaagctccactttaagtccatcgcgcatgagctgctttggtttttaaaaggagatacgaatgtccgctaccttcaggataacggagtccgcatctggaacgaatgggcggatgaaaacggagagctcggaccggtttacggttctcaatggcgttcatggcgcggagcggacggcgagaccatcgatcaaatctcccggctgattcatgacatcaagacaaacccgaattccagacgtttaatcgtcagcgcctggaatgtcggcgaaattgatcatatggcgcttccgccttgccactgcctgtttcagttttatgtcgcggacggaaaactgtcgtgtcagctttatcagcgctcagcggatgtctttctcggcgtgccgtttaatattgcgtcttatgcgcttttaacaatgatgatcgcgcatgtgacggggcttgaaccgggtgagtttgttcatacattcggagacgtccacatttaccaaaaccatgtggagcaggtgaatttgcagctgacaagggatgtccgtccgctgccgaaactgcggtttgcgcgaaatgttgattctatttttgattttacgtttgaagactttatcattgaggattatgacccgcatccgcacataaaaggagctgtcagcgtatgatttcgtttatttttgcgatggatgaaaaccggctgatcggaaaagataacgatctgccttggcaccttcccgatgatctcgcatatttcaaaaaagtgacgacgggccacaccattgtaatggggcggaaaacgtttgaatcaatcggacgcccgcttccgaaccggcgtaacatcgttgtaacctcacgggacgaatcttcattcccgggctgtattatcgctgactcggctgaggaagtgctcaagctgatcccggcagatgaagaatgctttgtgattggcggcgcccagctgtacagtgcgctctttccttatgcggacagactctacatgacaaaaattcaccatgtctttgaaggagaccgtttttttccggaatttaatgaagctgaatgggaattgacatcccgcaaacagggagtaaaagatgaaaaaaacccttacgattatgagtaccttgtatacgagaaaaagaattgagtttaagcagggggacaagaattgattcgttacggctgccttgtgatgtacgttgtatttatgttcatgaaaaatattcaggagtatatcaatcaaaaagagcttgacccgcggctttcttttcaaaaacagatgaggctggtgtatgagcggccgaaagcctttatgagaggctgcattgacgtgtcgggatcggcaatcggcattcatcatgatcagccgctcccggacggccccgtattgtatgtgcatcccagattgcgcccggctgatcttctgctgcttgcgggacatcttgaagagccggctggttttatcgctggcgagaaagctttccggatgccgtttctcggaaattggttgcggctgatgggtgtcatttgtgacggagacagccgggatgccgtgtttcaggaggcagaagtccgtctgcaaaaagggcaaagcctgattctgtccgaagacggcaaaatcaatccggaggaactggcccttcgtttcgatctcccgattgtgcctgtcagcacttcgggaacagaccggctgctgcggggcagattactgaaacggctgaaaccggctgacattgaattacatataaagcccgcttattatccggccggtcagaaacggctccgtgcataaaaaaagcacagtctctatagagaggctgtgctttttatttcagataaaggggactttgacgcaataaaataaaatacagaaaaacatcgaggcgctgccgcctaaaacaaaactgtgccaaatggcgtgatgatacggaacctttctccaaatataaaatattgtgccggcggaatacaataagccgccgaaaagaagaaggccgaaaccggggcctgacagcgaagcgtacagcggtttaatggcgacgatgatcagccagcccatcattaaatagacaagcgttgaaaaaatgataaaccgcttcacgaaaaagattttaaacacgatgcctccgatggcaagcgaccaaacaataattaaaagggtcagaccgagcgcccctttaaggggtcctaataaaaatggcgtatatgttccggctattaatacgtatatcgcggaatgatccacaatttcaagaatgtctttcgtttttttatgctgaatgctgtgcaaaagagtcgagctgagatacagcagcagcattgaagcgccgaagattgaaaagctgacgatgtctgtcggcgagccgtatttcaccgcgaagagaatgagaaaaataagcgccggaatcgacagcaatacaccgattccgtgtgtgacggcatttgcgatttcttcttttattgtgaacaatcaaatgtcctcctttttaaaggatttgtttttgcagtgactgcaaaaagctcaacccttctaatgtaatttttgttccagcgcgtccacggccttttgtcacatagttcatcttttctaagtaatcaagcctgtttctgacctgctggggcgataatgtcattgtgctgttttcgcttaattcggatatgctccgtctgctggcgggttcgccttttgtatttaagtctttaattgattccaaaataaacaaaaactcttctttctccatcaatgtcagccgtttttcttttttcttagttgttttcgctttctggctgtttttgatatacagcgggacatcatcgggataaatcgtgttgccggatgctgccgcggccatatagtgcgccgcattttgaagttctctgatgttgccgttaaaggtgtgccgctcaaacagcggataaacggacggatcgatatgaacatgctgccccgaggctgtcagcatatgctgcagaagaagcggtatatcgctttttcgttcagataaagcagggagcggaaggcataacacgtgaagcctgtaaaataaatcttggctgaacgtattttctgcgccggtatcgccaagatccgccgtgctgcttgcaatgatgcgggcggaaagcccggcgtccagttcggaaagaaggcgggcctgtaccgagagcggcatgtctccgatttcatataagaataatgttccgcggcgggccctgtttaatgcgccttcagcgccgaacagttcatactcaagccgctcttcgctttggctgcagtgaacggtaataaatagttcgctgtttctgcgggatttatgatggatcgctctggccatttgtttttttccggttccgacttcacccgttatgaagaccggcaaatcagataaggcaaattgcgaggccaatcgtttcgcttctgaaaaggtgtgatgttcgccggctagttgataaaaaggatcagtttgttcaattacactcatgaattggctccttttggttctaattggtttaagtataacacgtttatgcgatcgaaaatatctttttctcttgtatcggttcatttaattttatttacaaaattaaaataattgtcttattatttgaatattcatgttataatggcatattaaatagggatttaaataagaaaggactctgtaaatgaaaccgttgcttaaagaagactctctcatccaggtaaaagacattttaaaagcgcaccaaaatgtaaaggacgttgtgatacatacgcctttgcagaggaatgacagactttctgagaggtatggctgcaacatctatttgaaaagggaagacctgcaggtggtcagatcatttaagctcagaggggcttataataaaatgaggcagctctcaaaagagcagactgaaaacggaattgtatgcgcaagtgcgggaaaccatgcgcagggggttgcgttttcatgcaaacacctcggcattcacggcaagatttttatgccgtcaaccacaccgagacagaaagtatcccaagtggaactgttcggaaaagaatttgtagaaatcatattgacgggtgacactttcgatgatgcgtataagagttctgcggaatgctgtgaaaaagaaaaccgcacgtttattcatccgtttgacgatcccgatgtcatggccggacagggaacggctgccatcgaaattttaaatgacattgacgttgaaccgcattttctttttgcaagcgtagggggaggaggactcctgtccgggctcggcacgtacatgaaaaacatctcgccggatacaaaaatcatagcggtagagccgaagggcgcagcctcctattttgaatcgaaaaaagccggacaagtggttgaacttgagaaaattgataaatttgtcgatggggcggccgtaaaaaaaatcggcgccgaaacctttcaaacgctcgaaaccgtcgtcgatgacgttgtgcttgtcccggaaggaaaagtgtgcagcacgattctcgaattatataatcaatgcgccatcgtagcggagccggcgggggcattgtccgtgtcagcacttgatctgtacaaggaagagattaaagggaaaaacgtcatctgcatggtcagcggagggaataacgacatcggcagaatgcaggagatgaaggagcgctccatgatttatgaggggctgcagcattattttatcgttaatttcccgcaaagggcgggagcgcttcgcgaatacctagatgaagtgcttgggcctgatgatgacatcacccggtttgaatacacgaaaaaaaataacaaaagcagcggccccgcattggtcggcattgagctcaagcatcgggaagattacggcgcgctcattgcccggatgaatcaaaaaggatttcattacgtagaggtgaataaagatcaggatctgttccacctgttaatctgactttttttagaacggccgcgcaaaatgacagacacgctttctcagattgtatataataaaaagaaaacaatcgaaaaagaaggattgatatcttgttactcaaaagcctagagttcaaacgacaggacgggattcaggtaaaagtgacagaaataccggttgtcacggaaggtgaacattatttttttcaaattcatcagcaccttgagctttatttgagagaggtttttgcttcacaaagtgtgagaacagtgtattcattccgacaatatgtcaagcgccgtatgaagtggaaagattacgaggccgttttcaaccaagagattttaaaacataacgcctaacggtgcatattccttagcgccttccttttgataagggagggtgcgggaatttttttatgatgaatgctgtaagcgttttatccatggggggaatggaaatgaaaaaaatgaaaatcttcgctgccgtcttttgtttgctgctcttgtgcgcctgcggggggaaaacgataaaagacccgctgaactatcagattgaaccgttttcatatcaaaaccaagatggaaaaacagtgtcactgaaaagcctgaaggggcatgtttggattgccgattttatgtttacaaattgtaattcagtctgtccgccgatgacggcccacatgaccgaactgcaaaaaaaactgaaggctgagaacctggacgtgcggattgtgtcgttcagtgtagatcctgaaaatgatacgccgaaacagctgaaagcatttgcttccaaatatccgctttcgcttcgcaactgggattttctgaccggttacagccaaaaggacattgaagattttgcgctgaacagctttaaatcaatcgtcaaaaagccggagggagaggatcaggtcatacataaaacctctttttatttagtcgggcctgacgggaaggtgcttaaagattatgacggtgtgcagaaagttccgtatgatgacatcatctcagatgtcagagcggctgaggagctcaagtaaactggcagattagacattttcaaatctgaaaaaacatgttacactttccactagtagacggggaaggagcaaccagattgaagctgcgaatgttctcattgatcgccggactggctttgcttttatcagcttgttctgtccagcgcaccggttctgacgctgaagaaccgaaaacgaaagatcatattgtcatagctgcggtcggtgattcattgactgaaggagtaggagatcctgacggttcaggatacgtcggcagggcagcggagtctcttaagaaaaagggacaggtgaaaacggtagatattaaaaattatgcggtgcagggtgacaaaacgtcggacctgctggaaaagcttgataataaaaaagttcagaaatcattaaagagcgccgactatatcttttttaccatcggcggcaatgacttaatgaaggtgctccgccagaatatgatgcagctgacggttcagccgttccaaaaggaagagaaaccttttgaaaaacgattcaaggcgatcgtttcaaaaatccgcaaatataatgaaaacgcagagctggtgtatgtcagcatgtataatccattcacgtttacgctgcctgaattaaaagaaattaatggggttgtaacggattggaacaagatcgccgcaaaagagctggaaaaagatccccacgccgctgcggtgaatgttgaagacttgttcagtcaaaaaagcggcagcagacggatttcaaaggatgatgattttcatccgaacgcaaaagggtatgcactcatcgccgatcgattgtacggcatcattgaaaaacaagggttaccagcagaatagggtgaaatgatgaaaaagtggaaatcgctgttttttgttcttctcgcactcaatgtgattgccgccgcgttaattgtgacattattggttatgccgggagagcaggcgaaaatacaagatcagacaaaaagtgagtacggctttcatatcacgagctcgaaagaatctcttgccaggtttgtgaatgcgtacttaaaagagaaggcatcgaatcagcttgactacaaagtggacatcaataacgatgtgcacgtggcaggtaaaattaaagcattctcaacctccattaacgcggtcgtcacatttgaaccgtccgtacaggagaacggagatgtgatgttgaaagtgacgaagttttccttaggcgaattaagcctgccgatcagctttgtgctgaattatatggacagcttttatgaactcccgtcatttgtgcacgttcattccggggataaaagcatcgagatccgtctgtcggaaatgcctttagacaacggcatgtatgtaaaagcggataaaatcaatctcgacacggatgaaattgaattttcctattatcatccaaaacaataagttttcataaaaaaaacacagatcctttcagggatttgtgttttttcgtgtcagcgttttttgtccagcttgctgaacagtttgattaacgttgcgagctcttcatcagagtagcagtcaaaccgtttaaaaaagtattctgtttttttctggttgaaatgatcgacaattttctccccggcttccgtaatatggattctgataattcgtctgtcctctttggaacggatgcgggtgatccattccttttctactaaagcgtcggtcactgcggtaatgtggcttgcggagacctcaagaatgggggcgaattccgttacttttttaggcccttgttcactgagaatccgcaaaatggtgaattcgttcctggacagctctttatctagaatttcattaacttcatttctgatttgtttaaacacttttcgaagcaaagcttccatatcatacatcatttgtgtccttactttcaaatcatgaacctccaatatgtagtcagcgtggcattcgtttagcttcccctgaaagcagaattatttttattctgtttatacatgctataatataataataccacgtatgaacaaaggagggcacccgtatgtcagaaaaaaaagaaatcgccacatttgcaggcggctgtttttggtgcatggtgaagccgtttgacgaacagcccgggattgaaaaggtggtgtccggctatacaggaggtcatactgagaatccgacttacgaagaagtgtgcagtgaaacgaccggacacagagaagccgttcaaatcacatttcaacctgacatttatccgtatgaaaagcttgtcgagctgttttggcagcagatcgacccgactgatgcaggcggccagtttgcagaccgcggaagttcatatcgggcggcgatatattaccataatgatgaacaaaaacaaatcgctgaagcctcaaaaaaacagcttgaagaaagcggcatatttaaaaagccgatcgtcacagacattttaaaggctgagcctttttatgaagcggaaggctatcatcagcacttttataagaaaaaccctgatcactacgggcgctaccgtgtaggttccggacgtcaaggctttctggatgagcattggagggacagataagatggcttttaataaagaagaaaaaatcaaatcattaaaccgcatgcaatatgaagtcacacaaaataacggaacggagccgccgtttcaaaatgaattctgggatcacaaagaagaggggctgtatgttgatatcgtatcgggaaagcccttgtttacttctctggataaattcgattctcattgcggctggcccagttttacaaaaccgattgaggaagaagaggttgacgaaaaactggacacaagccacgggatgatccggacggaagtgagaagcaaaacagcggattcccacttaggccacgtatttaatgacggtccggggccaagcggtctccgttattgcattaactctgcggcactccggtttattccgaaagacaagctgaaggaagagggctatgaagcctgcctgcatttatttgaaaaatagagctcagcaatgaggcctgcctatcagacaggccttttttctatgtttttttttcttcatgtaatcgttcaataatctttacgattgtgtcttttgtgatgagcggcgcctgatcggattgatatctggggagattgaccttccgaaattccggatgtttggcgggttccggcaatattgcgtaaagattgccccattcatataaagattccgtctcatgcggagaggtcagttcttcatgaagcttctcaccggggcgttttcctacttcaacagcggcggggcgaggcagtccgtgcctgaacgcatattcttcaaatccgtgaagcagttcttcaagcctcagggactccattttaaaaataaatgtttctccgccctttgtaatcgccgcagattgcagggtgagcgttgcggcatcatcaatcgacataaaaaacctcgtcatgtttttatccgtaatggtgagcggaccgcctgccatcaactgctcaaataaaataggaataacggaaccgcgtgaacctagaacattgccgaagcggaccgaacaaaataccgtaccgcggttttgaacatgatgattcgcctgatgaaacagcttttcggacaacagcttcgtagctcccattgtgtttaccggggaaacagctttatcggttttttaagatatgtactgcattttgagggactatcagtgacggtgaggtcgaaaacgaaaaattaaacctcaggataggggtaatttcaaactgagccggaattggtccttttcttttttgtgtcatcgtaacgataacttctttgaagaccattcttaatagcgcgttctttttctctgtgcttgattcaatgtgatattgatcaattatcctatttatgttgtttctgactgtattactgtctatttctgattgcgctttttgagttccattgagctcatgcttggcaatctggagttctttaaattcttcatctaaaacagcttttcttttcaaaaaaagttcatcagtgtaaatgccgctctcatatttctcgaagataaaattctctttgttttttaactcttgttctttttgtgaaagatgttcagacatttgcttttttgttttcacattactatttacgtcttcgtatttagaaatcattgaagtgatatgttttgttaaagtcttattatctaagttgcttaaagaagagaggtaatccaaaatggcattttcaacatcgttatatcttacataagtgcatttattctttttgcaagtgagtgatttaacgtgatacacactttccgtgccgtttttgttttctcgcgttctcctagtttcgtatttagataatggttcaccgcacttagaacaagtgcatacgcctgccaattcacttaattccaatgcatttttattaggcagcagggggactttgtttgcaattttatcttgtgattgttgaaattgttcttgatctattataggggcatgtgcatccgatactacaatttgttccttttcaggtctaattgttcgtttaccgtcttttgttttttccctaaccttatatttaacagttccgatatacgcttcgttttgcagaattgctttaattgtgtattgattccagcgcttttttcctgatggagtcggtatttgtaattttgttaagtgagaagcaatcgctgtataactataatcttttccattcaacccatttaaaaagatgttaaagatgaattgaacgacttttgctttttcttcgactgggactagtttggatgtttttttgtttaaccggtatccataaggcgctagtccggaaatccatttcccttgtgccgcatatgtgtatttagcgcctgtcatacgctctctggtcatttcaaattcttctctggccataaacaattcaaaacgaatctgacgcatgtctgcagggtttcgagggtcataaactttatatggtgtaatgataatcaatcgcttgctttgaagcaggttaacaatttgtcccgcatcactgtagctcccgcggctgagtcttgttatttctttaacagcaattgcctggtacttgccttcctcgaggtctttaagacattctttaaaaacagggcggccctcaatgctttccccagacccgatttccatttttaattcataggggatttcaatcgacttcagtattttattcatgagttctttttgttctgttagcgtatcttcgcctgttcttttttctcgctccatatcctgacgagagcgtctaagataacccaaaatatttgtaatgttgtaagaatgaacgatgttttttaactccaaaaatcagcacctcctctttattgtatttgctgtaaaaacagaagtattcatacaatatgctgtctgacattgaagctgaagcatcctcaccatatggttgtacgcaagagtttgggttcttagttttaggcgtgtcaacaagtaaataacgaacagttttgacttcgcctttatagttaactttaatcgtatccccatcaactgttctgttaagcgttacatcgaccagctttttcttattttcagatttctttttatccgacgaatccttctttgaagcattttcggctttttcattcttgtcattattgcttttgtcgtttgcttgggtgtctgcctttgtctcttttgcattcttttcttcttgctgcgttgttttagctttatctgaatctgttttatctgtagaagcagaatcagacccacacgcagccaaagaaaagcttagagataatgcggcaatacctaacaaccatttcttcattgtaattcccccaaatttgtttgttctgtctctatatcggacaaaccttcctaattataagtgtaaaaccaaatattgtaaatttcattttggcattttaagacactcaaatacagttgtgtggtaaaatttagtgactcaaacaccttagaggagggaaatttaattggaagaaggaaagttaattcgcatgactcttgatgggataaaggaagctgtttctaaatacggaacttttcctatgctccaacatggagggcatgtcatggaagatgctgcttttcaattcagagacccagccagtcctcaagaaattaatagtttagaaaagatgttaggggtaactttgcctaatgattataaagagttcctattcaatcacaatggaatggaaatgtttaatggtattgagcttcttagtacagaagggataattgaatttaatgaagttcaagacttccctaagggatatgtcctaattgggtatcattatgatggcaggtatgttattgatgtaaacaaatcaaataaagggttggggtatatgttgcatctggattcaattgataatattgaagatgcggtatatttagactctaactttgagatatggtttgacatgttggtgtcatcaaatggagctaaatactgggaagtgaagccgaaaatccaagagtattataaatatatttcagaatagaaaatttagataagattaagtgggaacgagacttaaatgaaagtatttgaagcagcctcgttcatttcagccgcagaaaagcgggcaaaacaatacgatcagattagagaacaatttatcaatctcagaaaagcgtttcagggaatggctgacttagacgacagtgagttttcaggcaaaggtgctgataacatcaaagcattctttcaagaccacgccggcgtcacagacagctggcttgatctgatcgatatgaagattgcgtttcttaacagtatttcaggaaaagtaacagatgcgggactggccgattcgtttgtggaagagtcctttttagaacacgagctgtttcatgcgaagaataaatcacaagccatcatgcaggagcagcgcaatgaaatgaaaggtatccttgatgaaatcagtgatatcattcatctagaagttttttccacataagatgtcgatcaaaagctggattcagcagataaaaaaaggaacgataccgtaaataagctcggcaagcttgatcacgatctaacgaaagaatacgcagaaaccgaagcgaacgaacagttcattcaggcagattttcaacagcttcaaaatgcaacgggtaaagggaaaaacgccactccgcttcactataacgccaaggcatacagggaaagtgacatacataagaaaaaaggcgagattgcaagacattcagacacatatttaacgtttaagaaggaagaagcaaaagagcgggaaatcaaggatctgaagaaaaaactcgccgacggtgtgaccgatccggatgaatatttagaaattgcgaagaagatcggctatgaaaaccttgaaccttcccagcagcaatatgtcattcagcttgaacaagcaaaacagatggaagaagccggagaagtgacttgggatattttaaaaggagccggcgttggtttatatgatgtcgggaaagacacggtaaccggtttatggcaactaatcactaaacctgatgaagttgttgaaggtatcataggggcagttgctcatccaattaacacgtataatgccatttcaacagctattgaggaatcgtatcaaaaagatatggtaaatggagatgcttactccagatcaagatgggtgacatatgcgataggtacagtagttacctctgtagtaggcacaaagggagccggttctcttacaaaagctgacgtagcaggaaaagtcacctctaaagtcaataaagcaggccaaaaactgaaagatgtctcaattgctgatttattgccttataatccccgttacgatgttgttccggctggaggagttccttataatgtagttaacagtgaaaatttaaaggatcggttacttagattaattgaatcagcaaatcctagaacggtattaccaaggaataaaggtcgatgggaaggcgcacctggtgacggaaaatggtattccgacatacctgaagtaaaagcagcgactaagggagaaccgattacttttaaagatggacgtcctgattttactccatggactgttgcaaacattaagtttaagactggtgaattaaatggaacgaaaaaagattttaggcttgtttataaaaaaattaaagagatcaagggttttaaatctcaagcgcaggcgaaaaaatggctgtcacaacagggacttaccccacaccatttggatagtgtcacaatacaactagtgcctagtgtgattaataacaaaatacctcatattggaggagcttctgatttaaggggagggtattagaatgagtttcaataaaattgaacaaaagttaaaagaatttacgatagatactgaaacagaacccaacattaatacaaacgagcagctcaaagaaattgaaagaaatataggtaatcaattgccttccgactataaggattttttgaagggatatggaggctgttatttagaaagtaaaaaaacaacagatgaagttgagtacgacgtttgctacaaacctatagagaaagatccttggatgggtaaggaagatgatacacaattactagagagcttctatggtttagctaacgatcataacagtctccaagaagcaatcaatacttattctgatcgctttcctgggaatattattcctatagcaagctcggcaggtggtaatgtaatatgtatggacatcgacaatgaaaaagttttgttttgggatcacgaattaagtcagcctgataaagactttttcctaattgccaattcgtttgaggagtttatcctaagtttagtagacgaaccaattgaaacggatgatagtgacagtgatgtggaaattgagattttagaaaatgactttggaaaattgctctttggtaaggacaattagcttttatttttaggaaaagtattgcaaagttaagctctcagaaagagagcttttttattttcgatagtaactaattataaaaagggagagaggttatggattcgtaccaaataaagaaattaaaacccgaagaatacaataagtgtaataatatttgggacatggaaaagaaaatggctaaggtgttttatgacgaattagtaagcggcaacagaattacttttatttactcagtgaatgacgagtttataggagaaggattgttagtttttcaaaacaatgacccggattataccattccggataaacgcatttatctatctcgtatgattgttaaagaaggatatcgaaatcgtgggataggtggcattattgttgattatttgattgattatgctaaacaactaggatatgagtttgacaggtgatcacaaatcataaaataaaaagcccactcatatgagtagggctaaattaatttttaacctccgactggcctttcagctacctggatgttagatggtgaatctgtactcaattgcgttaaagctaccccacttaaaattacagttaaaatagatacgcaaagcacaatttttttcataagattccctccacctgattcattttctgttcagcccaaattttttcattgaaaaagcttgttgcttcttcaaaagcacctattgattcaaacctttttgcagctatgtaggacaattcatctacactttcaaggtcattttgttgttttaaaaactcaatataacggatgcaattattgaagttgttttttaattcaccgcaatataggttgtataggatgctaattttggcttcgtatatcttattctccattaatatgagtctttcctgtgctttattgtaaaaattaatggctttcattttttcgtcaattttaaatagttccttaattatcatgaataaagaatttatataataatttgaattcatccaagattcatttccaatagctttttcgagagatttaatgcacttatcaggtttgtcccaatcagaatacacgatactaaggttgtgatataactgagcttccaaatattcatcctttgtttcttgtgcaatgtctattgcttctaaataatatgtttctgactcttcaaaccgtttcatatcggaatagtttgcagcagcaatcattgttgaagttgccagtttgcatttataatcagggtgtcgcttatatattgcaattgcattcttgatgtagtgttgtgccacaatgctttgtttaacaagagtgtataagtaggagaccttggagtagaattcagctgcttcaatttcatccggaatttctgcaagctttttctctgctaatccatataagttaattgctcgatcataatttttgttgtatgcctcgtacattgcttcgaataaataaaagttatattccaatttatcgttcgttctttttatgaaattttcattctcttcagtgaaataagtgtgcttttgtaaaggctctccgcgtgaagagtgtagcaacattttgtgtctttcttctaataaactgtaatatgcaagaacttcttgatcctcttccatatcatcgaacaggcttttaatctctgagtaatattttattgactcatgtaccttttgtttctttatagcaatgtaccaatcattcagtgtagtagcaacaacttctgaagcgatcttgctcatccaaacccctctttctgaaaatttcaaaaaccctttgggaataatcataacatagtcattgaaaaaattgtaaaaggatgtagagattttgggattttctaatttgaaaaaacgaaaaaaaataccctcctcgttagagaagggatgtgatcagtttgttgttgcttttaacgaagcaagccactcatctaatgttcctgagaaaccttgttgagctgctaattcatatgctgattttccatctttacctgcagcaccagtagctccagtactgcctttttcaccttttaatgaagctaaccattcaaaagtgatgaatattcaaggcgggagtaagggaaattaacaaaaaaatgtgagggaatgtagatgaaacgatttatcttggttataccgttattggctgctgttattgcctctccaactcaaatgaaagcaagtccaatgccttgtagtgcagtactcgaaccggtaaatcaaaaactgaaaaatgcgaagggtgcggcactaatctataaaatgcagttatacccgccaagtgctgcaagaacgaatatgagtattcttgctgtccaccttcctcagccatcttcttatggaagctacgacggttatgaaggatttgccgccaaaacaggggagatcagttggcgatttaaactatatccaactcccgaggaagagagccctaattgggctggaaggattgattccatatcggctgaaatgacaaatgttaaagtgcaagtacgcctttcaaattctaagacgcaaaagttggggccaagtgtaataacaaacaatattcaatcttgctattagaaatgtagagttcttatcaaagagagcaatgcgactggatcttttgtaaagtgtcaaaaaggtaattgatcgagaaattctggtgaaaaatgaaaaagagcccattaagatgcaatgtctggagtcaattcatcatttgacagaagagagccggcaaaagtcgatattgcgtttgattttgtacatagaaagacggcataaaaagaaatggttagctaaaaaaaggcaaagagtcaacgctctttaccatcaggtgttttccttaagcggtctgcaatatgcttaattaaactcagcgcagcagtcactaatccaataactaaaacaatttcaagtaagaggataaatccaaaatttaaaccgcgactttcaaagtaatcactggtaaaaaagaggaattgataaattccaagcattagcacaataaaggaagcgcctataatcgccagagactttttagagaactccttagtatggttaaaattataaaccaataagaacaaaaatagacaagccatggcgatcttatgagtcaatgaatcacttgctgagaacccttgcacaagtaaggagataattaatccggtcattccgattattttgttcaatatatcacctgctttgtataagtatgaccttagatgtcagcttaccaattaaaggtgatactctcaacataatgcagtttaaagttaacttaaaaatgtgattattttaagaaaggggttgaaatatgctcggttgtcaaaaaggggagcaagtaaggtctttgagaatggagaaatgggaattatattgtggacgacaaatcgaggttctgtaggtgttgaatgggactctggtgaatatggtgaatacaatgataatgtcgatgagctattaatgttagcagattaatatgctttccgaaagttaaacgaaagcagttcattaaaggaagggttagacaatgattaaaataacgttattccaagatgaatattgcaatggtgaatgggttgaaattgataggctattaaatggtttcataagagcagagtcaattaatattgaagtgattgatatcaaatacaattcattaaatactatgcgaactcataatacagctctgcgtatattgagaaaggacttaagatcactaggacgtgaagatgaaatcgtgattttaaacggagtaagaggaagaaatgaaacctatgtagcaaccagggaaactgagtactttaccaatgaatcaattaaagaggtgcattatgctggtgacaataaagaagctgcctttagcaaaattgatggcacttcaggcaacaggctaattttagatgtttgttttgatggcttgaggattaaatcttttatcaaaattcataatggtgagcttttgataaattgggcagcacaaagaaagaggttgaagactacaatgccaaactaattgcggcacaatttctttgaaatgttggagagagctgaacaagtctagataaaagaagaaggattttatcactggcttgttttttgtgtaggagccttgaatcttcgattgtattatcaatatatcatatttttacaaataatccatttctgtcttaagatagtttttaatgaatacaaaaagccccacgaatggagctgctaaattacgttttattgaacatagccagaaaagtcgctcggagcagagaaagatagatagtaaagcgcattggcatctagattttttattgttcctgtagctgtaccgttagcatttacagttagtgtttcagtagcaaaaatccagtcggaatcattccaaactttcacagttagtttagttccaatattgtttgtaattgaatagcttatcgaagattttccttgaaaataactgtttgaatataatgtattgccagttgcttgtccagcgaatgtcaatttgtttttcgtaagatttacaatgctatttgaattaggagggttaagaccaaaagctttaaattcaccttcggcagagctagtaagcttagttgaaaacctagaattgccggtctcagcagatgcggcagtggcaaagctcagagaaagaatggccaccatggtgcaaacaataaaactaaacaactttttcaaattaaacactcctttatttgtaaattcaagtaaataataacacttaattttaggaggtcaataggtttattcaaactggaatgaatctgtcacaaaatatgaagagcattttggtcaaggataacttattatattatgtactaaattttcagttcattttaaggggctaagcattaaggagttatgtaacggagagattatactctccaagattcaaaggaatgtgtgcggagtttaccatgtagtcttaaatctataatcactttcagccagctataagaatgtttattaatctcatggggcttttttaatacgattccttcaagatgcttttctttggcagattaaagtaagctagcgtcccattacagtctcaaaatcaggaacaccaccttgggctgcaaaaacaacagtaccattgagcatatcaagattcgagagttctgggaacttgcttgttactttattgttgtgacgaagtataaagctggaaggttcagtgtgagctttaggagctgaatttcttagagaaagcactgtatgaagagggattttaattaaataaagcagacattaagcctgctttatctttttgaacattattccttttttatatgcattatgttctcaccaaatgcccgtccttaagattttaaattctgggcacgatcagactttttagggaaaatacattctaacaaaagaaaaaataaagttaatcctaatgataatttaaaattgtcgctgttcccaattgaacataagatacccactatataaatgaataaaaacctaaacaatgaggcaaatataaacttgaagaagttatccccaatgagatgccttccaacagccaaaaaaatattatcaaaagtaaaagaataaacaaccatacacacacttgttataacaatctgtttaaattctatttctaattcaaagaagcttacaagcacatttgctgatcctgttgcaaataagattatcactattatgactgcagtaggaatgagtgataaaaccaaagctcctattactgtagataataaaaatttttcatttgtgtttttttctgcagcttctttcttttctcctctgtacataaaaataaaaaagacgatgagagataaaagataaattgataacgtcataacaagcagattcatggtgatctctccttacctaattaaaacaaaagagtgaaggttgtaagcctcactctcttgtttttaatgtatagttataccaaaaagaatacaacaaccttcgcaattaactgtgcatcagctaatggaattccggctttcactaaggccacagtaacagctgtttctccgaaatttgtaagttcatctataacgtccgccgctttgtgtccccacttagaacaagcatcaccagctttttgagcccatttatatgggatctttttaataaggtttcctaaagcgggaccgccaaccctaagtgcttttactaatatttgtttagcgaaaggaatgccctgtgtatgtacttcagaatttgaagctaaaggagcctgtacgctattttgaactacaggtgcttttttactttctgctgcacttgcatagccaggagaaacaactgatatagtcagcacagccaacgtgaacaccatgataaatgaaataggttttttcttcattaaaattttcagttataaaagaaggaacaagaattttaaaaacatacttttgttattatacgagacacaacttttttaaaaaagaaccgaaagtctcactggggatgcccattttatgccgtggagaagattcaataaaactgtaattttaacaaaaacaaatattttcagggtaacgtctgagtgttaaaacactcagaggggggaattaggtttgagaaacaccattggcaagattggaattttactggagtggtttgctttatgattttgggcaggagttaatgcgaaagagctaactcagactaggaatgatactgaaagcaacatctacctttaatcaatcagtcaatatacttaacttaaaaccgcctcaaatattaagaccctaagttactcgacaactgcagatgattgggaggatgccggaactacatacgggataccaaatttgaaaagtactcaacggccgctgtcgttcaaacataggatttgcttttaaatttgcctacagggggttggtcatcttatttagctggattagctaaaatgatcattctaggtgaatgtaaattgtttactttaaggataggcaggaatttaagatggcaggggcaactttaatgacaaaacaccttgtaacgattgatgaagataaggatcgaaagaaaaaatcgggagtgacagctttatcatctcaaactaaggcggcccaaaagttgctgcaatgtgataaaaaataatcctgccttaggtgggaggattattacatgctgtttattaagctgtaaacaaacgcaacaataaatagtggataagagataatagcaattagttttgaagatttgctctttttttcaaatgtgtatatcagtgcaaatcctaaaaagaatattgtgacaaaccaagaagaataggacgggtacaatgcaataagtaagacaataagagtggataacgcaaaagaagagtttagtgttattttctgatcgtttttcaaataaaccgcctccttacacatattccccccatataaaaacacttaaacattatattaagtcagcatgattaaatgataaacattttaagtaaagaacaagataaagcaatccggcatttcaaggacaagctgaacatgtctgaaaaactgtaaatacccttagttaatgtaaactgcttagagataagcaaaatgattaagcggaggagctgtatagacttataagaccttatataaacattagatcgcttaaagaaggtgatgtggttgatcagccaattgaatatttcatgatgcaattgtacggttctataatggtgaagacctcgccgtgttccatttgtctagggggaattggtttaaattcataaacatgaggcgttttagtctgtcatttcctaaaacagtgttttattcttgttacaaatatgcaagaagggcggtttgaacttgtataaagtgtttataatgctgttaattttgttatgtataacattagggtgtcaaaaccaacataacaaacattttatggaggctgagcaaactatggtcggctatgtcatcttaaaaagagagaatcaagcaattctcatacctaatgagaaagctgatgttaaagactataaaaatcttagtgaaaaagaaattattgagaagtatagatcggatatagttatactgggacttagtcaacttaacaataaagatgacttgagcaaaggacaaaaaatacgtatttggtataaaaaattaaatgaatcttcacctccaaaaacaaacatctcaaagtttgaaagtatttagtaccatattctgtaattcctcggaatgccgctgcaaaactgaagcggcatattgaacagaaataatgtcttcaaaccttacctcattcgcggtggcttaatcctgccccaagatttatttgacgattgttgactcaggtgcagagaaggcacatgccaagaacacatttttgaattactgggcaccttgaataaaaccagcattcccgtattcatatgagaagagatcggtactgaacgctggataaagaaaaaagttaaccgtacatttgaacaagcttgcgaggttttgataaagaaagaacagtcaagagacgaaccattacatacatataatactcctgtgaaagcgggggtgtagttttggaaccttaccaacgttatgaggaattgaagaagaaaacaataaaggttgtccataaagataattacagtatccgctatatagaacaggatgaagccagtgatgacttagatgaattttataaacaatttgctcaacatttattggaagctgctttggaaagaactgcagagtaagcttctttttttaattggttagtagtaagtatcttaataaacggctttatcggtactgatattaatcacatgcgtcacctcttgcagcaaagcggcttctgcgacattttgtccgccgataaggttggtttgaatggcttcaaagggattatcctcacatgtcggaacctgcttcagcgcagctgtgtgaaagacaatatcaacacctttcatcacttggttgactcttctgtagtcacgaacatcgccgagcacaaatgacagtctttgttcatccgcgtatttttgtttcatcacatattgtttgctgtcatctttgctgaacacaatgacttctttaggggttaagagcaaaaggcgttttactatttggcttccgattgatcctgtcccgcctgtgacgagaacagttttatcgtgaaaaaacggttgtagctctactgcttgctgtttaggcatggcttatcctccaactctcgtttctctaccatgcatcatatgttgaacaatttcagcgagttaatgaaagaaaccaataaatcaaaaattagagaaaaacattaatctgatgcgcttttatatcgctttacctggttaatagaatagaaatcacaaataaaacattgtactaaatgttcatcttaaatatttgctcatgtcaattctttctcttcataaattctcacatgcggacaatcttcacaaaaacttaacactgaacttcctgtatgtattttacaattaaagtgcacgttcataaaaggaggaaggaaaatgaatcattcaaaaacacttttgttaaccgcggcagccggattgatgctcacatgcggtgcggtttcttcccaggccaaacataagctgtctgatccttatcattttaccgtgaatgcggcggcggaaacggagccggttgatacagccggtgatgcagctgatgatcctgcgatttggctggaccccaagaatcctcagaacagcaaattgatcacaaccaataaaaaatcaggcttagtcgtgtacagcctagagggaaaggtgcttcattcctatcctaccgggaagctgaacaatgttgatatccgctatgattttccgttgaacggaaaaaaagttgatattgcggcggcatccaatcggtctgaaggaaagaataccattgagatttacgccatcgacggaaaaaacggcacattacaaagcattacggatccagaccgcccgattgcgtcagcaattgatgaagtatacggtttcagcttgtaccacagtcaaaaaacaggaaaatattacgcgatggtgacagggaaagaaggcgaatttgaacaatacgaattaaatgctgataaaaatggatacatatccggcaaaaaggtaagggcgtttaaaatgaattctcagacagaaggaatggcagcagacgatgaatacggcagtctttatatcgcagaagaagatgaggccatctggaagttcagcgctgagccggacggcggcagtaacggaacggttatcgatcgtgccgacggcaggcatttaacccctgatattgaaggactgacgatttactacgctgctgacgggaaaggttatttgcttgcatcaagccagggtaacagcagctacgcgatttatgaaagacagggacagaacaaatatgttgcggactttcagataacagacgggcctgagacagacggcacaagcgatacagacggcattgacgttctgggtttcgggctgggaactgaatatccgttcggcctttttgtcgcacaggacggagaaaatatagatcacggccaaaaggccaatcaaaattttaaaatggtgccttgggaaagaatcgctgataaaatcggctttcacccgcaggtcactaaacaggttgacccgagaaaactgactgacagaagcggaaaataaacatgaaaaaagcagcttatccaagctgctttttgatgtgaagagcgtttcatgagaaagtcttggaacggatagccgcaagcacagccggaagctggtcatacgtgtacgccggtactgtctcttgataattaagcgccgcgatttgttcacgttcacccgggtttgtcatataaaaatggattttatccgcaaaatccgcaagcccgctgtaagaaacaaaggatgaaaacgggggcgcgggagaaaggtctgtcagctgaaaggcctgacaagccgcaatgtctaagcttctcgtatttaaactgatattttcgatgccgcgtccgttctgattgagcgcaaaccgataagaacggtgagggtttaagaccacgtctgcgctgttgtaatataatgcggcacgttcgggtgcaatccattcatccattacgagcacattttgctgcctggcgatttttttaggcagatgtctgcgccatcccttcccgataatacgaagcgtatacggaagcttcgccgctgctttcaccagttcaacgcggttcgggtacgggtatccgatcagaagcagatttgtgtgaagagaagattcagcaggttgtttcttaaaaagccgctgattaacggggatcgggacataatatacgtgctgtaagcccatttgccggtaagcatcaagcgcgttttgttctatcgttaaaacgacatcggcgaaaggggcgattgtcatgctcacatcgaaataaaaaggatcttccgtcatccatagataaacgggaatctgttctgtcttcagccattgaagccattcagacggaatacggtctcccgtcatcatcagactgatgtctggtttgaatgcccgtatactgcggatggtatcttcctcaaactcagaaacagaaaaaaagcggacggaagactgtaaaaagccttcctcgatccagcggtcaaaatacgtgtatatgcctttatatcctgaacggatatataaaacgttcatatgctgttacgaagtgaacgtgacactttcaactttgtcgacgtcaagcaatgttgtagcagagcctgccggtgtaacggaattttcctgcgtaacaaaaacgattccgtgaatttcgtcaaaggccacaaattgaaccgggccgatcatgtctcctgaatccatcacaatgctgatgacagtgccgggctgaattcttgcaaaaatccatctcgccgctaatgaaataccgcttcccaatacagattgtgcgctgagactgtctttcaccgctgcttcatctacttttgcatcaattgccgcttccaataattcttttacgctgtttttcacgttatctcctccatctgtaccgctagataaagcgctgttgtcaaatacaggggctaaaagagttttcaataagttctttttaagctccaaacgatcttcgctcatgcggacatacacctcctttaacaatttcaacctcacgtttattcatattcctgattgaagagattggtataagtcgaatgccgttttgcttgtgtttttttcaatatttaatcaaacagctgaattttcgaatcaggctttgtttgcctatgcggtttgtaagagtatgacatacgttgtatagattaaaaaatgaaggagaggaatactttggattcagaagaaactgtaaaacacgggggttttgaggaggaatttcagctcgtactgcttcttcttcttttgttatcccgtcagccgtccgaagatcattcagatttgcggcgtcagcttgtaatggcaaaagagcttggggttcctgtatcacgcgtcaatctgattaacggcagcacactgcaaaacgtaatagtcaaagaagtgctgtcagatttggccgtttttcaaaatccgctcaatcatacgagatcaaacgtcgcgatttcaagcatcgtcagctggggtgctttttaataacggatatcaggctctgtctctttcggagccgttttttatgttttacagaaggggtgatgggatggaaaagaagatctcaattatcttaacgagttacaacaaaccggatcttgtgaaacaggcgattgaaagtgttttgcatcagacctacagcaattgggagctgtttgtgatggatgatcattcaaatgaagaaacctcggctgccatcagtacgtatataaaagatcctcgcatatattatgacaacagttttatcaatcctgccgaacggctgaagtcgacccggtatgccgttttgattaatgatgcgctttcacgggctaaaggcgaatacatcacttatttgacagacgacaccgtatttcatccggataggctcagccgcatggcggaagcgcttaatcaatacagcgagtttgatgccgtctattccagccagaaggtgatacatgtaaacgggcgcggaacagaacaattccacttctatcgttttgctgaagaggtgcttgatcaggccgcttttctcgttgatcactgttcagtgatgcaccggagatcattgcttgagcgtgtgaaagagaagttcggcagcttttgggacgaagatgttatgcattggaatcacggagactctgttttttggagcaggctcaacacatttacatcatttctgccgataaaagaagtgttggatacgacctataaaacaccccactcatttcagaacacgtatcaatcgcttccgtctgtcctgatcgacggatcctttgtaaaggggacggatcagaaagtatatcagcttgaccgaaataaaaggaagcctgtaaacgagcgctggcatacgttatatgaaggccgaaccgtcgtcattccggatccgtttttatttcaatatgaggaagagaactccgtcagtattccgaattttcagctggtcagggatcagtttcatgtttattttatagaagacggggagaaaagactggttgatcatagcgcatttcgcttttaccgatttaaacggcatgacatcccggctttagaacgggacgaaatacaagcgcttccggacggtccgccgatcacccgggggacatcgggctgtattcaacatctgcccgggagaatgctgttgcgcattgaacgggaattttatgtttatttgagaggggttctccatccgatcagtcatgacgtagcgaaacgtttttttgcgaatcagaaggcgatacccatttcctttcagcaaattaaacaattaccaattggaatgccgttctatccggtgtacgatgaaattatgagaaatctcaatataacaaaaggttgagagatgcagttggatgtgtaaggaaaaggagagcttttatgaccgatcaatttgataaaaccgagaagcagtatatagagctaacttccggcattcagaggttcgagcatttcagtgtatatacggacccttttttgccgcagattttttcgcataactttgttcagctgcaccgtacatttccgttagacaaactgctgccgtttttttcgtccgttccgggcttgcttcaagccaattatattcatgtgaaagcggctccggagcacgcgtttccgcttcttctgaaacaaaatctcgtaaagcagggctgcgtagtggaagatgagctgttttttgcaaggaaactggaaaatggggacctgcaggcgggacacccgctcactgcttgggggacggaaaaaagcctcgccgacgggtcgtctattatgaacatctatgacgccctttacattggcgaggcggcggccgaacaaaagcttgagcggaaatatcctttgtataaggacggaacggtcatgcttgttgtatgctacagcgacgcctcgcaaacgattccgatcggctgcggagagcttttcatcaacaaagcagataaaaccgcaaaaatagaagaagtcgcaattctggaccaattccaacgaaaaggctacggatcgatattgatgaatgagctgatggcggcggcaaagctgaacggcatggaaaccgtataccttgtgacgtccgggatggacggtgtaaaccgcttttatgaaaaactcggcttcaaaagatttcggcgcgtgcatacaatttttcattattttcttacatagttgggcattcgcataaaccaattgggagttggcccgcatacaatgccgtatatcgtaagaagaaaggatgatttgcgtatgtacggatacggatatggctacggttgcggcagttttggctatggttacggacacggcggctgcggaggcggaaccagcacttttgtgctgatcgtggtattgtttattttattaatcatcgtcggtgcggcttttatttgttagactgaaaaaaatcctataatgaaaatcagcctgcagagaacatcactttctgcaggctttttgttatatccatgctgaaaaatcagcttgaaaaacattttaatacatattacctttctggagaagggggcgaaaatgtgaacataacgattgaagaattacctgaatccagaattgcttatttccgaaacgtcggagagtatggcggaaagcaaaacaaagaactgatggagtcatttaaaaactgggcgcaattgaatggtctgcttgatcattctgtcattttaggaattccgcaagatcatccgaatcgtactcctaaagagaaatgccgctatgatgtttgtcttgttatcaatcaagaccatgtgcctgaaccagcccggatcggtacattttccggaggtaagtacgctgttttcttgcttgatcatacaaaagaggcagtcagtggattttggaacactgttttttctgagatcgaaaaaaataatttatcaatcagagaacagcccattatcgaaaggtatactttacaaaaggtgaatcatcatttgtgtgaaatattgattcccatacagtaaagaagacgggaattttccgccttctgcttatctgattcagaccaaaaatgatgtgatgatgagctgagcaaagaataaaatcaacaataggaatagaatttccagaacgctcttcaggctgtcgggacatttccggcagcctgttttacagaaaggcattttctgcaaaaaactttctgaaggataagaatgcggttattcatctgttcatacaatgaagcaaatgggttttcgaggtggaaagatatggggagctatttaatcaaaccggagcttgacgcaaattatccgtcagtcagtcatggaaagggatcatatgtgtatgatcaggaggggaacaagtatcttgacggagcatcgggggcggtcacttgcaatatcggccacggcacggaggatattatacaagctttaaaagagcagcttgactctgtttcgtttgtgtatcgctcgcaattcaccagtactccggcagaagaactggctttatttctgggggatcatctgccgggcgggctgaattggtcattttttgtaaacagcggctcagaggcagtcgaaacagcgatgaaaatggccgttcaatattggcaggaaaaagggcaataccaaaaatccgtcttcttatcaagatggggcagttaccacggcattactttgggagcgctttcattatcggggttctacgaacggagataccgcttcacccagttgatcgaacggtttcctgccgtttcagcgcctaatatgtatcgttcagagctgcagggagaggaatttgtgaaagctgcggcggctgaactggaaacggctgttcaacggatcggttcctcatttatcgcgggatttgtcgcagaaccgattgtcggagcagccggggcggccatcactccgccggcaggttattatgaagcgcttgaggaggtctgccgccggcacggtattttgtttatcgcggatgaagtcatgacggggctcgggagaacagggcggatgcttgcttctgagcattgggggatcgcacctgatatcgcggtgctcggaaaagggttaggcgccggttacgctccgatagcggcagctgttgcgtctgatgacatcattgaaacgatcaagcggggctccggggtcattatgagcggacatacgtacagtgccaacccatactgtgctagagcggcgcttgaagtgcttcgctatgttaagaaacacgagctgcttcggcagtcagaggagaaaggcgtaatgctgaagcggaaattagaagaaatcaaagagcgcagcggggtgattggggatgtccgcggtaaaggcctcctgatcggggttgaattcgttaaggataaaacgacgaaggacgttttttcgaaaaaacaggccttcaccgaaaaaatcattaaagcggcaaaaaaacggggcctgcttatttaccctgcaaagcccggtattgacagcggagaaggagacgccgtcatcatcgccccgccgttcacgatttcatatgccgagctggatgagctgtcagatctattttcacaggccgcagaagaagttgaaaaaatgatgaagaaggattgagctgatatgtctatttttcataaaaaaatcgatattcatgaagcaattgccgatgtcaaggacgaatctgtcattatgttcggcggttttgggggagtgggttcacctccgtcattaatcgaagcgattttggaaagcggcgttaaagagctgaccgtcatctgcaatgatgccggatttccggaaatcggcatcggcccgcttatcgttcataagcgggtaaaaaggctgatcgcttcccatatcggctcaaatcctgtcgcgggcagacaaatgactgacggagcgcttgaggtggaattttcgccgcaagggacgcttgctgaacggattcgcgcaggcggagcggggctaggcggtattttaactgatatcggcattgataacgcaaccgtttgtgaaaacaaagaaaccgtaacgattgacggaaagtcctatttagttgaaaaagcgctgacggctgatttcgcttttgtgtccgcacatactgctgatgaattcgggaatctgacgtttgacaaaacggcgcgcaacatgaaccctctgatggctgcggcggccgaaagaacatttgctgaggcggcagagattgtgcctgccggcgaacttgacagcgagcatattgtaacgccgggcgttttcgtggagggtgtcgtgcaaagtgaaggagtgaagtggaaatgggcttgggaatagcggaaagagagagtatcgcgaggcgggccgccagtgaagttacctcaggtatgattgtcaacctggggatcggcattccttctttagtgccgaactttctgccggccggcatagaggtcatgctgcaggcggaaaacggcgtcctcgggatcggcggcagtccggagcgtggagaggaggatgagcttttatgcaatgcggccggatttcctgtcagtacagttaagggagcttcctattttgattcagctctgtcttttgccatgatcagaaaagggctgatagatattaccattttaggcgcgctccaagtcagcaggacaggtgatctcgccaattggctcgtgccggggaaaaaagtgcctggaatgggcggggcgatggagcttgcccaaggcgcgaaaaaagtggttgtcgtcatgagccacaccgatcagaaaggccggccgaagctggtcgaaagctgttcattgccgcttacagcagcgggctgtgcagatctcatcattacagagaaagccgtcatcagcatagatgagggggcttttgttcttgaggaactgctgaatggcacgaccatagacgatgtcattcaaacaacggatgccgaaatcagattgggagaatgttttcttaaaagggggcctgtccatggatcaattagaaaagaaagtcactgagtgggcggaagaaaacacagcaaaagcggtaagcttgctgaaacggctgatcggggaaaaaagcacgttcggccatgaatttaacgcacaggcagtcgttttagaaaaactgagacagtttgacatggatattgatgtatgggagccgagtgtcaaacatttgaaagagcatccttattttgtatcggaacgcgaagacttccatgaaagcccgaatatcacagctgtaaagaaaggggccgggggcggaagatcactgatactgaacggacatattgatgttgtcccggaaggaaatcccgccgcatggacgtatgaaccgtttaccgctgttgaaaaggacggcaaagtttacggccgcggttcaacggatatgaagggcggcaatacagccctcttgtttgcgttagaagcgcttgaagcctgcgggattacgttaaaaggagatgttctgtttcaaagtgtcgtagatgaagagtgcggcggcgcgggaacgctgtcggctgttatgaggggctacaaggctgacggggcgcttattccggaaccgactaatttaaagctgtttgttaagcagcaagggtctatgtggttccgcattacggtaagaggattgtccgcacacggcggcacccgctatgaaggggtgagcgccattgaaaaaagcctgcatgtcatcacagcccttaaagagcttgaacacgtccgcaacgcccgtatcacagacccgctttatcgggacgttccgattccggttcccattaatatcggcaccgtccaagggggaacgtggccatcatcggtagctgaccgtgtggtgatagaaggcaggtgcggaatagcgccggatgaaacgcccgaagcagtaaaagaagagctggcaagctggctgaaagatttggagtaccgggatgaatggtttaaacaccaccccgcggaaatagaatggtttggggctcagtggcttccgaatgatctcccggatgagcatccgctgatttccgctctggaatcttcttttgagaaaatgaaaggggcaaaaccggttcgtgaagcgtccccgtggggaacggacggagggcttttgcagcacgcgggacagacgccggtcatcgtcttcgggccgggagaagtcaaagcggcgcatcaggcgaatgaatacattgaaatccgggcgttaatcgatgccgtcaaaatcatttctctttttatcatggaatggtgcggggtggcagatgggggtgacggagctgataaaggaactgagggctgaaaagggagcggccgagattgatgcagaccgtttcaatgagcggctcagagtcattcgttatgacggacagatcacggcgcttattccggccgttttggcagaagcaaagcaagaaggagcccaaaaggtaattttctttgccaagcgcggcgatgagccggaatttgtcaagcatctttttattgttgagggtgtcatagacgggtattacaacgggcatgaggctgttgtgatggtgcgctatttatcagaggaacggagacggtcagattcatatgtatcagaagattcgactgttgaccgtttatatgagacaccgcggcggggactgactcagacagaaagcacgctgatgttcagaaaagcggccgaagatgatgcagaccgtttaacgcacttatataaacatgtttttcttacctatccgactcctgtctttaatcccctttatattaaaaaaacaatgagagaaaacaccatctattatgccgcattcgatcaggatcgtctcattggggcggcaagcgcagatatcaatccggtattggggcacgctgaaatgaccgattgcgcggttctgtcagattacagggggaactccgtaacggcacacttgtttaaagcgttggagcaggaactcgcgggccggggaatcatccatcttttttccttggcccgtgcagcgtcttacgggatgaatgctgttttgtatcatgccggatacggctacagaggcaggcttgtgaacaactgccgcatttcagaagggctcgaaaatatgaatatatggtgcaagactttacgtttggccattcataaggaggaattcgtttgacaaacaaatggtttcagccgaagcgtcattggaaggagattgaattgtggaaagatgtgccggaagacaagtggaatgattggctgtggcagctcacccatactgtaagaaccgtcgatgatctgaaaaaagtcattcatttgaccgaagaggaagaagaaggcgtcaggatgtctgtaaaaaccattcccctgaacattacgccttattatgcttctttaatggatcccgataacccgagatgtccgatccgcatgcagtccgtgccgctgtcagaagaaatgcacaaaacgaaatatgaccttgaagatccgctgtttgaagatgaagattcaccggttcccggtcttacgcaccgctatcccgaccgcgttctttttctagtgacaaatcaatgctcgatgtattgccgatattgcacaagaaggcgtttttccggacagatcggaatgggggtgccgaaaaaacagcttgatgcggccatcgcttacatccgggaaacgccggaaatccgtgactgcctgatttccggcggagacgggcttttaatcaacgatcagattctggaatatattttaaaaaacctgcgtgacattccccaccttgaaattatccggatcggaacgagagcacccgtcgtatttccgcagcggataacggataacctttgtcagattttgaaaaagtatcatccggtctggctgaacactcattttaatacgagcatcgaactgacggaagaatcggttgcggcgtgtgaaaagctcgttaacgcaggtgttccggtcggtaaccaggccgttattttagcaggcattaacgattcggtgccgattatgaaaaaactcatgcatgatttagtgaaaatccgcgtgcgtccgtattatatttatcaatgtgatttgtcagaggggatcggccatttcagagcgcctgtgtcgaaagggctggaaatcattgaaggactgagaggccacacaacgggctttgccgtgccgacctttgtcgtcgacgccccgggcggaggcggtaaaatcgccctgcagccgaactacttgctctcccaaagtccggagaaagttgtgatcagaaacttcgaaggggtgattacatcttatcccgagccggaaaactatatcccgaatcaagccgacgactattttgaatctgtttttccgggaacgatggccaaacgcgagccggtcggactgagcgccattttcgcggacaaagaggtttcgttcacaccggaaaatgtatcgaggatcgacagaaggaaaacgtttacatccaaccctgatcatgaaacgctgaaagaccgcagggaaaaaagagatgaattgaaagaaaagaaatttattgcacagcaaaagaaagagcaaaaagcaggatcggaagtcggaggtgagtcgccgtgaagccatgcgagtggtgcggcaatcagaaggcgtcagcttgtcaggcggctgtgtactgggagcttcctgacggtacgagggccatagaaattacagaaacacccgcattcgcctgttcctcctgcggcatgacttatcaggaggaagcggtcatagcggaaatcgaaaatcagctttttttagtcaatgcaaaaaaattaccggaaacactcacatatcaagagctgatggggacagaacggatcttgaaacggaattattttgacttctcctagtcttcttttgttgtaatttcacacttgaaatgtataatagtacaacaaaagacagtcatcaggaggggaaacccatgaaatccttttatcactatttgatgaaatacaggcatcccaagccgcaggacgcaatcagccagtttgcgaatcaggcatacgaagatcacggctttccgaaaacgtcaagcgattatcacgagctcagttcttatttagaactgagcgccgactatttagaaacgatggcgacatttgatgaagcttgggaaaaatatgagaccgaggtgcatcacgcctgacgaaaaaccgcacattgtgcggttttttttctgttgaaatcactcgcttatgaggtgctgtatgatcaaatcccgcaacgccgtccgttttgatcagcacgtaaacacatcttcctgacggcacgtatcataaggcagtagaatgtatagctgcagagttcaccggatcaggcctgctgacggcggggtcctgggtaaggagcctcttttcacggagaaataatcaaacatttaaatgaagtgaggggaatcaaatgatccattaggtaagactgatgaggcactgacgtttggacggaataggggattttatgtgacaaggttgaagcggattgaagttgtggcttcattgaaagccgaaacgagtttgattgtttatgataaacaagccattgcaaatatgcagccggaattggatctccttacatcttcgatgatgtgtttcacggcaaatcttgaacatcacggcggtgatattgtcaacatgccttcgggccgggtatttacctttgcgtcatagagaaaaaaacaaagactcataaaaatagaagctttttgtctcagcattgttactgctcactgctcagtcgatagagagcggaatgtcatcaggcgcttctgttacggtaagtgaaaaaacgcacaagcatgttgcggtttttgccattttgaacaggtgcagaaatagatatttcctgtggttttcatgcccatgcgaaatgatggcggccggcatacgatagcgtatgacagtccgcggcaagggggagacagcatgaagccagataaaccgaaatttcaagtgggagacatcgtggtcgtcgtgatgtacggaaccgtcggcaccattacgaaggttcatcaaattgataaacattatctttacgaagtcaatcataatgaagtgctttattttgaatcgtccatccagctttataaagattatgagggcgtgatcgtcgatatggagaaattggatattgaatatgaatttctgatcggcgacgtcgtatatgtaaaggactacggaaaggaattattccgtgtcatcggccacagaactgaaatatggagatatttagaggatggctgggaggatattatttatgagctgactcggctgaaagacggagagtggcttgaaacggaggaagaggatctcacgctggttctgagaaaatatgaaatggatcagtttgtgcatcagctgctgtttgtccactatgttggagaagcatctcatgagatcggcgaggataccgtcgcgtctgctcttcttcagtttgaaggcgatgctgatgatcccgataccctgcatgtgctggcggtatcgattgtagatgagctgcttgatatttataacgattataagattctttatcatttgttcggtgacgaagaatataaagatatgatgaattttgtgctggaaagcctgcgggagcatttcagctagccggcaaaaaaacggacggtgacatataaaaaccagggcagacagccggcaaagatgacaaacgacattcctttcagcactttttccaatacgatatcaaatccatctccgtccaataaagccatcattttcgtcatcatcttttctccctccggggcttgtttttaaaagtatatgagcggacaaaacgtttagaactttcgggtataatttgaacggttttttcataaaacataaaaaaggaggcggtgtttgcatgaaagaaatagatcttgtgattgacacagaagaaatagctgattatttttacagtcagcttgctatgcgcgggtacataccgagtgaagaggaaatcttcgaaatagccgacatcacctttgattatttattagaaaaatgtatgatagacgaagagcttgatgaagactgaaactgcggaaccgaagtgaaaaagcttcggttttttcaatcagctcgggagaatgaaacatggggggaaaacgttgtacaagccagcaagtcttttcgcattgtttattctgctcgcagcagcgatccggatagaagccgtccgggtttttgatgagcgtgtcatagaagcggctgtcaggatcagggctgcctggctgaatgaattgatgttatggataacggagctcggcacgaccgcggtgcttttgccgcttcttcttttgacaggcgcggctctgtatatgtacaaaaaaacgccggatgttgtttttttgccgcttctctttctcattgaacggattgtaaacataaaaataaaagaattgattgaaagagccagacccgcttttgaaccgctcgtccatgaaacctcatacagttttccgagcggccactccatgaattcggcagttatgtatcccgtcatcgcttactttttgatcaagcatgttccgtttttcacgaaaagaaaacgggccgtcaccgtctttaccggagttctcgtcattctgatcggattcagcagaatttatttgggcgcgcattttccgacggatgtccttgccggattcagtctcggactttgcctcgttgcgctttttgcgctctttgacgaaaagtatcatccgtttcgacaaaaatagagacaggagaaatgagaaaaaacgctaatactattaagaaataagagggagggatcttgatgctgttatcgctgcccgtgtttaaaaaaaagacttgcgcctatgatgtgacgatttttcaaacaccccgctacggcgagaaaaagggatacagggtcgtctatcggacagagctggccgctgacaatcatcaagacgcactggaaagggcattttctgtttttaatgtgcctgatacggtcccaaacgactatcaagccagattcatagcgaccggagatgtcatactcatagacgaaggaagaaaaggaaagacctattacaggcttaaccctgcgggatggagcaaaattaaccggctgctcgtccagccgaggtaagatggggccggctgaatcttcagccggcttccgtattgtctgggaaacacagtgttaaggcttccgtttagcggcggaatgctcttttccatgcgcttcatcagctgcaatgacgtctgaaacgggcacgtgattgttctttttctggccggtcacccggttgcgctgttttttgcccattatgttcactcctttttctttaggcttgtcatcccgcatattctgcccaagatcgccccagtcatgctgatgattgtctcttaccgttattcagtgtacaatgggtgggagtttgaataggcaggaggaaaaggaaatgagtgtacatataaacgctgaaaaaggccaaattgcggatacagtgcttttgccgggagatccgctccgagcgaaatttattgcggaaacgtatcttgaaaatgtggaatgctataatgaagtcagaggaatgtacggatttacgggtacatataacggcaaaaaagtatcagttcaaggcaccggcatgggtgttccgtctatctctatttatgtgaatgaactgattcaaagctatgatgttcaaaacttaatcagagtcggctcatgcggagccatccgtaatgacgtgaaggtgcgtgacgtgattttggctatgacgtcttcaacggattcacagatgaaccgtgtcgccttcggcagtgtagattatgctccttgcgcagacttcgaactgcttcataaagcgtaccaggaagcgcaaaaaaacaatcttcccgtagcggtcggaagcgtattcaccgccgatcagttttacaatgaagactcccaaatcgaaaagcttgccagatacggcgttctcggcgtagagatggaaacgactgctttatatacgcttgccgctaaatacggcaaaaaagcgctgtctatcctgactgtaagcgatcacgtattaacgggagaagaaacaacggcagaggagcgtcaaacgacttttcatgatatgattaaactggcgctgcatactgtttcgtaaacttgagatgagggttatgctgattaaagcagccctcttctttatgcatcgccctgattcaaaaaaagaaaggtaagtgtaaaatgaagaaatccactaaatggttctcgctcgctgccgctctcagcgtaaccgcaatcgtgggaaccggctgcagcatttcaggcggcgacagccacaaggacacaaaaacagcagctgaaacaaaacaatcagatgacacatcaagcaaaaaaacaacgaaggcagaaaacagcgattttgtattggagagcaaatactttaatgatattaaagaagtgaacgggcttgagaccattcaaaacccgacaaatacacttgcgctcgtgaataagacatacacgctgccgggagattataaaccgaatgatctcgtgatcccgaaagtcgaattttcttttactgagaaaatcgagaaacgatatatccgcaaacctgccgccgatgctttggcggaactattcagcgccgggaaaaaagaaggttatgacctggttgccgtttcaggataccgctcttatgacagacagaaagttattttcgataatgaagtcagtctgaaaggtgaaaaaaaggcgaaagaagccgtcgcatatccagggcaaagcgaacaccagacggggcttgccatggacatttccagcaaaagcaacggatatgagctgaatgaagcgttcggaaacacggcggacggcaaatgggtgaaagaccatgcgtatgaatacggctttatcatccgctatcctaaaggcaaagaaaatgtcacaaagtatgagtatgaaccatggcatttacgctatgtaggcaaaaaagcggcaaaagccatccatgaccatcaattaacgcttgaagaatattttaatgaagtaaagaaagtgtaataagaagaagcccgcttgaaaaatagaaagcgggctttctttattaccagaagagtaaacctccaagcgcaaatccggtaattaaaccaaggccgataccgtaggctgctccccagcctccccagcctccccaatagccgaacccgtatcctctgtgacggccgccgacaggggcgatatacactttgctgttagtcacccgtacgattcttccgacgtggactctgccgtttcgttctgtaattcttgctacttttccctggtgctgccggcaaagatgataatagttttgcatcttttctcctcctatccaacctatctttctatgtcagcttatgatagagtgcggtaaaaaggttggacgaaaacaggaggacaatcgccgttttacttgtaagcgacaaaagcgcagtgtcccatatattcacggtacgtctgcataagctcgtaatgagccgtcagcgtatcgtagtgaaccggctgaataacgggcgataaatccatttctgtagtcggctcctgcgcattgttttcatagacagcgggaatgaaatccgctttttgaaagccttgctgaagcaatctctgtttccatgacgtttcatcctgcaatacggtaaaaccgtagaagtcttttatctgcgtgatggcgttttccggcatgggcttttgtaaagcagcttcaatgccgatcagcatacccccgggtttaaggacccgcaggatttcagacagcgatgaatcaagatttgaaaaggtgagaactgattcggaaagaacggcggaaaattgattttcagcaaacgggagccgctcaagctccgccaaatagcccggaatggttaagccttcagcggcaaatcgttttgctgctttttcaagcataaggggatccttatcaacacaggtgacggggtacagcaggtgaccgagataagcggccgtctgtcccgttccgcagccggcgtcaagaatcggttcgccaggaggaggagccgcttttgtgagaacggctttggaaaaagcgagcccgcccgggtgagcccctccgactccgaataaggacagcatttctaaatatttgctcaaaggccgaatcctccttttttcctcagcatatgttgagagaaaaacataggtttgggtaaacgggaaagaagggcgcctcacgtttgaagttgacgaatgagcgttcgtctatgataataatgtaagaataaaaaggtggtgttttcttgaagcggcaatttaaactgttttttattatattgatcaccgcggtcgcagcctcggcgcttacgctgtttatcacgggcaatacgaccattttcggacaaggctcggctgctttgacgaacagcaaatttgagaaattcaataaagcctacgaacagattaaaagtgattactatcaaaaaacagatgacagcaaattagtagacggagcgataaaaggcatgatcagttccctggatgatccatattcttcttatatggacccgcaggaaggaaagtcttttgaagaaacaatttccgcttcgtttgaaggcatcggcgcacaagtggaagaaaaggacggcagtatcctgatcgtatcgccgattaaagggtcacccgcggaaaaagcgggggttaaaccgaatgaccagattttgaaggtcaacggcaaaagcgttaagggccttaatgtaaacgaagccgtcgcattaatccgcggcaaaaagggaacaaacgtcaagctcgtgctgcacagagcgggtgtcggcgatctgaacctgtcgatcaaacgtgacaccattccggttgaaacggtgtactctgaaatgaaaaaaggagacatcggcgaaatccaaatcacatccttctccgaatcgacggcaaaagagctgaattcagccattgacagcctcgaaaaacaaggagcgaaaggatacattctcgatttaaggggcaacccgggcggactgatggatgaagccatcaaaatgagcaacatgtttatcgataaagggaaaaatatcatgcaggtcgaatacaaagacggcacgaaagaggttatgaaagcgacgaaagagcgcaaagtgacaaaaccgacagtcgtcctcgtcaatgacggcaccgcgagcgccgcagaaatcatgtcggctgcgctgcatgaatcatcgggcattccgctgatcggcgagaaaacgttcggaaaaggaaccgtgcagacggcaaaagattacagcgacggttctaccgttaaactgacaatcgctaaatggctgacagcggacggagagtggattcataaaaaaggcatcaaaccgcaatatcaggttaagcttcctgaatatgcgaacctgccgtatttagatgcgaaaaaaacatacaaatacggggattccggaacgaccgtcacaaatgcgcaaaaaatgctgaaagcgctggggtacagcgtgaaagtaaacggcacgtatgataaagcatttgaacaagccgttaaacaattccaagcaaaagagaaactgaaacaaacaggcattataaagggagacacaacggcaaaattgatgacggatctgcaaaaacagcttgcggacaacgatacacaaatgaaaaaagccgttgaaacattaaataagaatatgaaatagtaaaaaacacccgatgcgccgctcgcgcattgggtgttttctgtttgcgaaaagcccgtcttatgtcgtttcctgttcaaaaaggtggctgttcgcctgaatgaaaaactgtgattgctcatagtgataggtgacttttgagaagtcaaacggctggccgttggttaaatgaaaaatcgtttcaacgcaaagcttaggcgctcctgtaaacaggcctaagtactccgcttcttcctcatttaacatccccgcgtacagatataaatctgaaaaaccgcgctttaatccgagaccttctctaatataatcaaatattgattctgccacgatctctttattcaaatacgtaataatcgatttgttgtaaaatgactcttcgatacacaatgtcatcccgtcaatatatcggattcgtttgacataatacacgtcgccgtcaggcggcatattcagattttgggcagcctcaggcgtgggttttctcacttccagcgctaataatttggaagtgacattaaaatcttccagcgattctttaaatccctgattagaaagcagactgatatacccttttcttttattccgtctgacaaaaatgccgcttcccctcacttgaaacacaatcccctttttttctaataaatctaaggacttggtgatcgtgcttttgctcacgttaaaccgggtcattaaggtttgcagcacaggcagtttatccccttgctgcagctgatgttcttctatgtatttttcaatatctatcgcgatttgctggtattttaacatatacattcctcattcatttattgtcccgcttcttccagaattatagcataatcgtttttaaaagccatttcgtaaattaactataattgtttatgtattgataaattataccggtacaattataatgtaaacgtataatatgaaaatgaaggcaggaattcttctgcacttgcgaagcggatgcttgaagcggctgcagtgcatttattcggcatgcaagcggcagtcaaataaaggaggatataaacgatggggacattgccaaaagattttttatggggaggcgctctggccgcccaccaatttgaagggggatggaataaaggcggcaagggaccgagtgtagtggacgttatgacagcaggtgcgcatggtgtgccccggaaaataacagatacaattgaagagcgggaattttatccgaatcatgaagcgattgatttttatcatcgttataaagaggacatcgcattattcagcgagctgggtctgaaatgtttaagaacgtccatcggctggagcagaatttttcctaaaggtgatgaagccgagcccaatgaggaaggattggctttttacgaccgggtgtttgatgaattgctgaaacatgggattgaaccggtaatcacgttgtcacattttgagatgccgctgcatttggcgagagaatacggcggtttcagaaacagaaaaacagtcggattttttgtaaaattcgctgaagtgtgttttgaacgctataaacataaggtgaagtattggatgacgtttaacgaaatcaataataagatggatgtgaataatcctatctttttatggacgaactcgggcgtcgccgtcaaagaaaacgaaaacgcaaaagaagtcatgtatcaggccggccatcacgaactgctggcaagcgcattggctgtttcgaagggaagagacatcaatcccgagttcaggatcggcgcgatggtatcacatgttccgatttacccgtactcatctcaccccgacgatgtgatgctggctgaagaaacgatgagacagcgttttttcttcccggacgtgcaggttcgcggatattatccaagctatgcgttaaaagaatttgaaagagaaggttatcagatacactttgaagacggtgatgaagagattttgaaaaacggccgagtggactacctcggattcagctattacatgtctacaaccgtaaaaagtgatgtatcaaacgataataccggggatgtcgtaaacggaggattgccaaacggtgtggaaaatccttatattacagcgagtgattggggctgggcgattgacccgaccggtttacgatacacattaaaccgcttatacgaccgctaccagattccattatttatcgtggaaaacggattcggcgccatcgacacattagaagaggacggttcaattcatgacacttcaagaattgaatatttatcgtcgcatataaaagctttgaaaaaagcaatcacatatgatggtgtggatgtaatgggctatacaccatggggaattattgatatcgtgtcatttacaaccggagaaatgaaaaaacgctacggcatgatttatgttgatcgggataatgaaggcaacggttcaatgaggcggcttaagaaagactcatttgaatggtataaaaaagtgattgaaacaaacggctcatatgtatcttaaaggtgtaaaaagggaaggcttcaccgttgtgtgaagccggctttttatcagtaattttgaaagcgtattcatttaagcggaaaggaggtgactgtccggcttttcatttagaatcgcttataaaaataaggaaagggatggtggttcatgttttttaaaaaaggtctgcacatgaccctggtttttcttatgtttttctttttcatatcaagcagcacggaaaccgaagtgtatgcggctgatcggaaggcttcagacaaaaacaaagtaagggtgtggttcagttctgaaaaagatccggcttcccgtacgtggtatgacgggccgctggaagtgaaatacgccttagacgaacaaacaccgcttacatggacaaaaaagaaggcttctgactccgccgccgtgtatattgatccgtcgcgccgctatcaaagtgtgttaggcgtaggatcgtccctggaagaatccacaatccataatttatcaaaaatgacacccgcaaaaagaaaagaagtgctgaaaaaactggttgatcccaaagatggtatcggaatggacgttatgcgcataacgatcgggacatctgattttacggcacaggaattttatacgtatgacgatatgcctgaaggccaaacagatcctaagctccatcatttctcgattcaaaaggatattgatttacacattacagcaaccatcaaggaagcgctggcgataaatccggaactgaaaatcattgcctcgccgtggagtccgccggcttggatgaaaacgaatgaaaacctcaagcggggaaagctgaaagataaatatatcggcgcactggccgtttacttccgcaaatttattgaggcgtacgaaaagcaaggaattccgatttatgccatgacccttcaaaatgaacctttgctggaaatcgactatccgagcatgtatatgccgccgtctcagcagcgcaaactggcactggccttaaaaaaagaaatgaaacaacaagtaattgacacgaaaatttggatttatgatcacaatgcgagcggggcgtggaactatattccgccgattttagatgataaaaaaggaaaccgggcggcagacggcatcgcttttcacgattatgacggtgatctttccgtcatgtcggagatcggaaagagatatcctgataaatctattcacttaacggagcggtctgtctgggggacggcaggggcggaccggatcgcgcagtatttccgcaacggcgcgtcgagctacaatgcgtgggtgacgatgctcgacagtcaaatcaagacgcatcattggataggcaccccggacccgacgctgtttattcaggatgctaaaaaacctaaccgctattggaatatcccgatctttcatatgacaggcaacttttcaaaatttatcgaccggggagcaaagcggatagaaagtaattacggctccaaaaacacagtctcgaatgtatcgttccttaatcctgatcaatccattgtgacagtcgtaatcaaccagacatccgccgatcaaaaattccatgtcgtttcagaaaatcggcagtttgaagctgtcatcccggctaaaactgtagctacctataaatggaagagaaaaaagtaaaaaaccggcacatttacgtgccggcttctttctgttaagcgcctttttggttcagttcatcagaaggcgctttattgaataaaccgtctttgacggcgtttgaagccgctttttttacaaaaaacgggttgaggataataacggctgccatattagcggtcaaaccccaaaagccttcatatagaccgtgggcggattgggtgatatttaccgtgaatgtcacgataagaccgacgagaagaccgataattgtcgcttctttcgtttgattcttccaaaacagactgacggcgatagccggaaagatctgaaccatgccggaaacaccgagaagctgaagggtaacgagcgcagtcgggaacagcatgccgaataaaagcgcgagcccgatgacgacaaataccattgaacgggtgatcatcgtcagcttgcttggtgacacattcgggtgaatcaaatcccgatataagttattcgcaaataagtttgatgctccgatggccatgatagagcagggaatcaatgacgcaagagcaatcgtggagtaagcaaagccctgcgcgactccgccgtaagacgtttgaatcagcttcaataaagcgagccgcggattggtatcttccggcaggacaagaaacgcgataaagccgagaaaaataacaagaatcaaaacaatattataaagcggcagaaacatgctgtttttgcggacggcatctgcgctttttgccgtaaatacgccggttgccgcatgcgcccacataaagagcgccagcgcagatacgatggaagctgtgataaaccaaggaattcctttcggccccgagtccggaatcgtcagcatttgcggcgctttttcagccaaagtgtgaatcatcggcgtccagccgtgaaaatggatcagcgggagtgacacgaccataaacagcataatcacccacacgagaatgtctttaataatcgccgtaaacgtcggccctttaattccgctgaaaaaagtatacagcgctacaagaataaaagagatgatgacgaccatattgacattaatgacacccgttccggccacctgaagcgtatcttgaattccgctcagctggagacaaatataaggaatgagcataagaacgccgacaatggcgacaagactggccaaaagtttactgtcaaaacgctcacgggcataatcggcaagcgtcgttaatttgtgtatttttgccactttccacagcttcggcagaaagaaataagcaataaaatacgccaaaacagaatacggaattgcaaaaaaagctacgcttccccctgtgtaggcggtgcttgtcaagcctaaaaacgtataagccgtatagaggtccgcgccgactaaaaaccagacgaggagccctccgaaccgtcttccgccgacagaccattcctcaacagaagtacgtgatgatttgtctcttccggctataaagccgatacagacaacggttaaaacgatgacggctgtaatgatcaatgctgttatatttgcgggcatcagtccagtcctccttgtttcttctgcagcctataaataagaaacgaacataatggagtgactgcgatccataaaagcagccagaaatgaaaaaaaggcagcccgataatgatcggatgaacccgattagcgactgacagcagggccagctggctgaaagggattaagatgagaacgaaaattagtgcttttctgaccatttactttcctcctgaaacttgataatgctccttatcatagcaggtgtcagataagatcacaagatatttttcagaaaaaaaagaattctattacttttttaactgaaacactttagttgcatcttcattcatattaaattagaatagttaatatctcgaactcaagatatttaggagtgaatacattgaatacacaaggattgcaccatgttaccgcatttgcaaaagatcctgttgaaaatcttcggttttatactgaagtgctgggtttgcggctcgttaaaaaaaccgttaattttgacgacccggccacttatcacttttatttcggcaaccaaaacggagagccgggcacgatcattacattttttccttttcagggaagccgcccgggaaccgtgggaaaagggcaggccggaagaatttatttttccgtgccgaaaggagcactcgcgttttggaagcgccggcttgaagaaaacggtttgtctgtaaaagaacagatcatgctgtctgaacaagtccttctctttaatgatacagaagacctgccgcttgccataatggaagatgaaagaagcggacagagtgaatggactcctccgggcattactgaaaaagaagcgatcacaggcatgagaggtgttcttctgtactcgtaccgtcctgaagcaaccattcaatttctcatagaacgcttcggttattcaaagacaggagaagaaaatcagattgtcaggctgcaatcggaggcacggatcggacatattatagatgttgaccttgcgccgaaagaagcaggtgccggcggttacgggacagttcatcatgtcgctttccgcacgagcgaaaaagagcaggcggagtggaaggacattcttgctgattctcatcttgcttcatctgacattcttgacaggtcatactttacttcaatctatttcagagaaagcggcggcattttatttgaaatggcaaccgatgaaccggggtttatgacggatgaatcttttgaaaatctcggaacagagctgaagcttccggaatggctggaagagcatcgcagtcagattacagctgttctgcccaaaatggagaaaggagaatgatgatgaaacatgtgtttgaacagggtacgtcagaaaatgttctgctgcttttgcacggaacgggaggaaatgaacatgatcttctgtcgctcggacgttttatcgatccgaacgcaagtctgctgggggtcagaggatcagtgtcagaaaacggcatgccccgtttttttaagcggctgaaagaaggcgtatttgacgagaaagatttaattgaacggacggaagaattaaagaatttcattgatgaagcggcgcaaatgtacgggttcagcagagaaaacgtgattgctgccggctattcaaacggcgccaatattgcagcaagtcttttgtttcattataaagatgtattgaaaggagcggttctgcatcatccgatggtgccgatacgcggagtgaagctgcctgatatggaagggctgcctgtgtttatcggtgcgggaaaacgcgatcccctatgtacaaaagaagaatcggaggagctttatcagtatctgacagatgctcatgcatccgttgctcttgaatggcaggagggcggtcatcagctcacacagcaggaagccgagcaggcacgagcctggtacagtgagcgattcctataaaaaacccttagtctgcttaagcggactaagggtttctttcatcttacagccaagttgacactttagatacaggcagccggttgcttttatgcgccggcttaacggctttaccgattgaaatcagcatgacgggcacgaaacgctcactcacgtcgaattctttaacgaattgctctttattgaatccgccgatcgcgcaagtgtcgtagccttttgctttagcggcaagcatcagctgcatcgctgctaaagaagcgtttaaaaatgctgaatcgcgggcaaactgatcattttggtatgcaccgttaatctggcctaatagcgtttgtttaatctcttctgtgatattgccttgctcagccagttcagcataaacttcttcaccattttcatttgcttttaagtcgcctaatacggcaataactgctgatgaatcaataatctgtttttgattaaaagcaaccggaagcagggcagcttttgcttcatcactgtgaaagacttgaaaatgccaatgctgaaggttccaggcggaaggcgcttgcgttgtgatttcaaggagttctgtcaattcctcttttgtaatgaccgcgtctttatcgtattctttaacagatgcgcgttcctttaaaacgtctaatacggatgtcatcatgtttcctccttcggataaacgtgttatcataatagaaaagttagaagcttactaaatgtaactcgaaaactaattttaatggatcacaaaaaacttgtcaattcatagatgaagggatgaactcacgtgggatatacaatgtgtcctaaaatggaatccgctttttctcttttgggaaaacgctggaacggcctcattatccatgtactgatggacgggccgaaacgatttaaagatatgaccgaaacgataccgacaatcagccaaaaaatgctcgcggagcggctcaaagagctggaacaaaatgaaatcgtcgagcgtcaggtgctgcctgaaacacctgtcaaagtcatttataaactgactgataaaggcatggccctgcaagccgtttttcaggaaatgcaaaaatgggcagacagtttttgcgagcccgggggatctgcgaacgacacatgtgatgaataataaaggctgcccaaggcagccttttcttaatgatcatgtttactcgtcataaaaaccattaatatcaaaattgttcagattgaggttcaagccttttaattgctttaataaagcatcgaatgtaaggaaataatcatttttacattccgccggaacatcgtttggagaaaatagtttcattcctccctcaatccactgtttccggtataactgaaatgccgcttcaattaaatgatcaggcgttacaataaaccctaagcttacgtcatggtcctcactgtagccgaattcaaacccgcagcaggggcaaatatcaaatgttttttgatattcgccgttataaacgggatttgtctctaatcctttaaatccgcatatcaaacaaggatacaactcactaaccaacatacatccctcttttattcagtttgcaatcattcagaacaagcggggaggccttttacagtttcccggttaaaaactgagcctcaccgagcccgaagctccaatcggcgttcccgttttctgtaatggaaatcatgacgtcctcgggtgatatgccgcattctgttttaagctgatcagccatcagttgatataacgtttctttctgatgttcggtgcgcgctttgctgacaatgctgatgatgacaagatctttgcttcttttgaaaccgagcccggtatcttctatgataagctcatgaggccgatgctggtgaacgatctgataacggtccgttactgggacgtcaaaagctttaaccatggcgtaatgggcggtatccagtaatttttttaatgctgcgtcatcccggccttcaataacgtcaaaacgaagtaatggcatattttattccccctgatggttttataatgtcgcaacttgtaaaaaaagtataacagttaatcaaaatataatcaaattataaccaaaatatttacatcttaatgcaatatcagagagaggcacaagttgttacaaccgcccaatcaattccctcattttatgaatacgcttaagaataggcagacataaaggaggaaaaacatgtaccctcgtcatgcattgtatcgcgggaatttcggtcctgccggatttccggcgagaagtccttttttgttcggcgctcctttattcggcggatttttaggcggtcttctcggaggcgtgattgccacaggttttacaagacctcgttatccgtacgggtttgccggttacggatacggaggcgtcccatacggcggtttcgggccgggagccggcggttatccgccattttattaagaaaaaacggcctgcatcgcgcgggccgtttctttatcttaaaatctccacttccgatagattgtagtcttcctgttttgaaaacataacttcaatcatcccgtctttatagactgcttttgttcctttccgtttgacgaggctcggaagtacgatttctttttttccttctcccaggctgctgttctctacaacgaggctgtgtgacgtatgcttaatcctgatacggtcgagttcctcttgttcggcgggaattttcgcaaaaacatgatcggatgtttcaaacaggtcaatttccggcttaagcggttccgcttcgaccggatcggtctttttggacatcgggtcgcgaaaagggaactgtccggcataaccggcgccgaatacgctttccatcactcggttgacatatgtctcgacatctttcggatcagcatttttaaacgtttctttagagaactgattttggaagggaaaatatctgttccaatcaaacacggcatctcaccctttcttaacggacaacatagtatatgcccgccggaagcttcccgtgatataatataatctgtttacagaaaggaaggggaaggccgtgcaagggaataacgtaagaaaaggaatcatttataccgcttgttctttcgtcatgtgggggctgtttccggtctattggaaacttcttgaacaaatacccgcattggacattttagctcacaggattttatggtcatttgttttcatgtgtgtgcttttaactgtgcttaagaagtggaaaaccggatggcgtgaactgcgtcttttgaaatcggaagggggcctgctggcgctttttttcgcttccgttttaatttccgttaattggtttgtgtacatatgggccgtcaatcacggctttttgcttgaagcaagtctcgggtactacattaatccgctcgtttccgttcttttgggcatcctattcttaaaagaaaagcttaacaagatgcaaacagcagccgtttctattgccggggcggccgtgatcatatctgcgtttcaatatggcgcggttccttatatcgcattgctgcttgcattcagcttcggtctgtacggcttatgtaaaaaaagaacccgcatgtccagcacgatcggactgtcgctggagacgcttttgattaccccggctgcacttatttatttaggatatacagctgacgggagcactcccgggtccttgggggcaggaacatgggcgctcctattcttcgcaggcgtatttacggccctgccgctgttgctgtttgcagagggggcaaagcgtctgccgctgtatcaagtcggcattttgcaatatatagcgccgaccattacccttatgctcggcgtatttgtgtatcatgaaccgttttccgggcaaaaagcgtttaccttcatttgtatatgggcagcattgcttttgtttaccttttcacagataaaatggaagcggccgataaaaagccgctaagcctttcgctttccagcaatagcttaaattatgtataatcattacgagtatgtaaaggagctgtacaatgggcactgataaagacatagcaaaagcctatcaggcactgtggaataaccgcactctcccggcttcaactcttgaagaagcggagaaggcaattgatcttgaactgcttgatcaaagaacacatccgaggctccggaagtcacccgaggaaaagtttgctctggcggtgcagcgaattgtagattcccggctgcggccgattgagaaatatgaattggttgaactacatacgaagcgtttgcaatttttaaaagaagaaagaggggagcagctatgaaagcgatcataaaagaagatgtgcaaacttctttagagcgatatgccgatcgtcctgtatatatccatttggaaacaacgaccggttcttattcagcgcatctgaatgagaaaaacatgacggttgtagcctatatacgcaatgcaaaagtgacgtaccatcaggcgaaaatcaaaggaaacggcccgtaccgcgtcggtttgaaaacggaagaaggctggatttacgcagaaggtctgactgaatatacagtagatgacgaagaccgcttgttaatggcagggcatctgccgggcggaaaattggcgatttcgcttcaaatcagcgaaaagccgtttacagtttaaagaaaagggtgaaaatcatgaaagaacatgtactcgtcatcctgcctcaccctgatgatgaatcatacggagtggcagggctgattgctttacacagacaaaaagatattcccgttacgtatgcatgcgcaacgcttggcgaaatgggccggaacatgggagatccttttttcgcgaaccgtgaaacactgccgctgttaagaaaacaagagctgatcgacgcatgcaaagcaatggacgttactgacctgagaatgctcgggcttcgtgataaaacactagaatttgaagatgacgagtggctcgcggatatgatggaagagattatcgacgatgtaaaaccgagtctgattgtcacattctatccggagcacggcgtccatccggatcatgatgcatgcggcgaagcggttatcagagcgctttacagaaagaaaaaagaggaccgcccgcgcacgctttgcatggcaatcacccgcaacagggaggaagccgtcggcaagcctgatgttattcttgatattaaagaggttgccgatattaaaatgaatgccttaaaagcgcaccgcacccaaacggaaggcatgctgagagagctggaagaaaaaataaaaaataacgagccggttcttcagacatggtttgaagaagaagtgtattggacatatccgtggaaagactgataaaaaaagggataaggctgaaatgccttatccctttttttgtgtcagatcggaagcgatcgcttctgcaagcgaagaccttattgataaatttgaaaaactcagtccgagctgcactgcggtttgggcgatttcaggacggattccggatattgtcgctttcacgccgagcattccgagtgattcaattaaggtgaaaagctgttgggcaaccatcgtatcaatcatggctacgcccgataaatcaatgtacagctgcgtgatgcgcttctctgaacactggtgcagcgtattctccaagatcatttttgctcttgccgtgtcaatatccccgatcagcggcagcagtccgacattgtcaaaaagcacaattaccggcgagctcagctcggtgatcaattctttttgcgcttcaagctgaatgtttgtgtttttatacatttcctctatgaaaatatgaatcaccacatcaaacgatttaatcagcgtatggaatatatcttcggcatcttcttctgtcaaggtgtctgaatgaagtctggtaaactgcttgacatggccgacatacaaatcacgaactctgataaactcgcgaatgatgtaatggatgggagtttttaaatgttcttcatcccgtgcggcttcaaacgcccacttttccaatgccgctgtatatacttccttctcttcagaaaaaatccgattgagctgataattaaacgccagattttgttttttcagattcgtgagtacagccgggtcagtagaagcataaacagaatcaggatccgtatcatgaagcgtatcaaaccatgtctgactgatgtcctccgcccgttcagttaaataatcgtacagcagtttatgttttggcattgctgctcctcctttatgaaattatcattttttttacataacgcgtttgcagcttcatcagtctgaagaataaaccgacagctcctgcggcaagtcccgcaattaaaccgatccagtagccgtatgccccgaggctcgtataagtgccgactgcgtaaccgagcggaagcccgatgatccaatacgacacaaaagccgcgccaagtgtatagttgacatccttatatcctctcagagcgccttgtatcggagctgctacggcatcagaaagctggaaaaacagcgcatagattaaaaagtgctgcgtcaacatgagcaccgccggatctgatgtatacattccggcgatttgcggcctgaacagtaaaatgaaagccgccgtgcataaagaaaaactaagcgccatcacgatcccgatatagctgtatgagcgggcatctctatagcgatttgcacctgcttcaaagccgaccaaaatggtcatggccatggatacgctgagcggcagcatatacaagagggaagcaaaattcattgccgcttggtgggctgcaatcgtcaccgtctgaaaatggctcataagcagtgtgacagccgcaaaaatgctcgtttcaaaaaataccgcaaaaccgataggcaatccgattttcaaaagcttcctgcattcagacggagaaaaacgatacagtttccgaaatacagagtacccggcaaacggctcaaatctgcagacgataaaaaagctgatggcgcaaatacaccagtaagtcagggcggaagcgagccccgccccgactcctcccaatgccggcatgttgaatttcccgaaaataaatacataatttaaaacaaaattaataggcaatgagcaaagcgtaataagcattgtgactcgcgttttgccgagtgcgtcaatgaacgagcgcaaaacggtgtacacaaacaaaggaaaaataccgagggataaaaatcctaaaaagtgttttgcgatcgtccggacacgaggttccaggcccaaatgtcccaagatcatatcaacggtgaaaaagccgatcaggataaccgccgcactgagaacggccgctacataaacggcctggatgacggaaaacggcacttccttttgtctgccggctccaaacagctgcgaaacaacgggcgtaacggccattaatattcctgccaggcccgtataaaccggcgtccacaggcttgaaccgattgcaaccccggctaaatcggcagcgctcactttccctgacatcaccgtatccaaaaaggtgatcagggaaaggcccgcctgtgtgattaaaatcggaatgaagatatgtaacagctgtctgaccttttggccgatcgtgttcgtttctctcaagttaggttccccgtttctttattttaacgagagaaattataacattttatgtataaaaagcaatgaaagccggcctactcttttttgtccggtttcggctttttaaacatcttggcataaatgaatgaaagtgaaatgacccctaaaaaggtgcagatatattgcatcagccgtgcgaattccatatgatgtgcgcctcctttcatgattatggtgcacacagcggcgcatatccatgcgcacgatgcagaaaataagggaaaggagctgatgtgacatgcgccacactcaaatgacggaaagcgcgtttaccgctgccgttcaaacgtatttgaaacaaattacagaggatgccggaatgatactgcggacattgaatgaaaaagaccaatgccttctttgcgaattagatgaactgggacatacgtttcaggaaatgcaggctgtcgcttcgtcgttttacctgcagtcatatatcgaacatttcacgccttcctatacagagctggcgagggccgtgcagcatctggcggaagaaaaacacggagcgctgattgtgattgaacgtgcagatccgctggacggaatgatacaaaaagggaccagcctgcatgccgagatcagtgcagctttaattgagagtattttttatcccggcaatccgcttcatgacggagccgtattggtcagagaaaaccgagttgtatcagcagccaatgtgcttccgctcacaacaaaacatgtcgatctcaaatacgggacgcgccacagggccgcgatgggactttcggccgtgactgatgcactcgtgctcgttgtttcagaagaaacgggaaaaatgtcctttgctaaagacggcggactgtatccgcttgtttcgccgcgggcgcttcatacgaaataataagaaaatgggaatattgtacccatttaatattaataaggtgaacatctttacctttttctgtattgatgttatcgtttaaatatacataaaatttaaaagaatagggagtggaaagatggcaaatgtattgatgatcggctttccgggagaaggccatatcaatccgtctttaggcgtcgtaaaagaactgaaggcaaaaggggaacatgtcgtatattacggcgtgaaggaatatgagaacaaaatcgcgtcaagcggagcggaattccgtgaatatgaagatttccgaaaagatgaattcggaaaaaacgcaacgggtgatgaacagcgggacgctaccgagtttttgcttttaatgattgagacttccaaaaaagccgcactccgtattcttgaggaagtaaaagatgaatcctacgactacatcctgtatgatcatcattttctggcaggaaggcttgtgagaaaccagctaaaactgccggcatattcactttgtacgacatttgcaatgaatgaagcatttattaaagaagtgttttcaaatacaaaccttgtatcagaggaatcatctcattatccggcttataccgaagcggtcagccggctcaatgaagaattcagcgcagacattaaaacgccgtatgatattttctcaaatgacggcagaaaaaccatcgtatttacttcaagagcgtttcagccgaaagaagaagagtttggcgattcttatctctttgtcggtccgtccataaccgaaagggcggcggctcaagatttcccgtttgaacagcttgcaggagaaaaagtcctgtttatttccatgggcacgatttttaacaatcagaaggaattgtttaataaatgcttaaaagcggtcagaaactttaacggaaaagccgtcatgtcaatcggcaaacatcttgatcctgcggagcttgatgaaattcctgagaatgtcattgtcaagccttatgttccgcagcttgagatcctgaaaagagcggacttatttatcactcacggcggaatgaacagtacgagcgaagggctttactacaaaaccccgatgatcgtcattccgatgggcgcagatcagttcgccgtcggaagccaagtggaaaacacgggcgcgggcaaaatgtttaaaaaagaagatgtaacagcggaactgctcactgaagcaataaaagaattgagcgaaaatcctgaatatcagacaaaagcatctgaaatcggagaatccctgaaagcggccggcggagcacagcgtgcagcggaattgatagcagaagacgtgaaaactgccgagacccgggttttgtaatcagccatcacccgcttcctttaaaggaagcgggctttttttgattgtttttcgggaggatttttcacgccgtaaagagaattgtatgaaaaacagacaagaaaggtggaatgtcgcggaaaaaagccatgttatgaaaatgattccaaagtcttttgtgaaatgttctcaatttatgtaaaatgtgtgacattggtgatgatctaaggccaaatgattcggaattaatgtcgacttctgaatgaatcctgcataacaggcggcgtccaaagaaaaggaacgtccctttcagcaatgataaataggaggtttttcgttatatgaagaaaaaaatcgcagccggactggctgtatctgcagtaatgacttcaaccttcgccgtgcatcccgctgaagcaaaaaccattcaagtaaaaagcggcgactctctttggaagctttcccggcaatatcataccagtatttcagccctgcagtcggaaaataaactgaaatcaacgatactccacccaggacagcggctgcacattcccgacggcagcggcacacataaaacggggcaaaagggaaaacgaagcacgggtgcctacacagttacatacggagactcgttatgggtgatcgcaaaaaaatacaaaatgagcgtttctgagctgagaagcctgaaccgtttgagttcagatgtcatctatcccggccagaaactgaaaattaaagggtctgccggcggcacggacggaggcggcagacagacaaagcctgataaaggcgcatcagggacttacactgtgaagccgggtgactcgctgtggaaaatcgccaatcaaaccggcatcaccatcgccgatctgaaaaagctgaatcaattaacatcagacatgctgtatccgaatcaagtgttaaagatcaaaggttcttcacataacggaaacagcggcacaacaccgccatctcattcaaacccttctgagaagccatccacttacaaagtaaaagcaggcgattccctctggaaaattgctaatcggttcggcatcaccgctcagctcatcagagaaaaaaataaattgacaactgatgtgcttcaaatcggacaagttctggtgattaacggaacgggaaaaacagaagatcctgtacggcagccggataacaaaccggcaaaaccaaacaagccgaatactcccgaacctccggtgacagggtcaaagattgacagaatgataggcgaggcgaaaaaacatgtcggcgtgccttaccgctggggaggcaatacgcctgcgggcttcgattgcagcggttacatctattaccttttaaataaggtaagctctgtttcccgtctgagcacggccggatattggaatacgatgaaacatatcagccagccgtcagcaggcgactttgtcttctttacgacatataaagcgggcccttctcatatgggaatgtatttaggcggaggagattttattcacgcaagctcctccggggttgaagtttcaaacttaagcaatccgtattggaaaaaagcttatttaggagcgcgcagttatttttaaaaaaagcctttcggggctttttttgtttaccattttcacgttttgacaagactgatgggtaaaaaaataagggggaggaagcatgaatcgtctcttgctttttctcatgctcgcatcaattacgctttgcggctgcggggggagacccgctcctgttccgcccaaaaaacatggggaaagccgcgcattggaagcatctgcataccgtgagcatgccggactcatcaatcaaaacgggaaaacgatcggatatatcgaagtgagggaatctgatgatgaagggtcagacattcatatatcagcggggcatctgccgcccggcacttctctcgggtttcatatttatgaaaaagggacatgtcaggcacctgatttcgaatcagccgacggtccgttcaaccctttgaacaaagaacacggcttcaacaatccgatgggtcatcacgccggggatctccccaatcttgaagtgggggctgacggtaaagtggatgtcattatgaacgcgccgcaaacttcattaaaagaagggagcagactcagcctgctcgaccgggacggaagcgcgttcgtcattcatgaacatacggacgattatttgacaaacccgagcggaaattccggagccagaatcgcctgcgctcccctgacaaaaagcgcccgcagggaatgagcccttttgtattgagtatacaagggcttttttagtatactcggttatggaatacaaatggaaaggaaacatcacctatgacttcagaattacagcacctatcacttccggaagatatacaaaacaaactgcaggcttatcaaaatcatcccgtttcccaagaattccgggatttaatcggatcatcaggctatgaggccgaagataaagcgattgtattcgatgccgtcattgctttgacaatgggaaaaaatatcttattaaaaggaccgacgggttcagggaaaacaaaattggcggaaacgctttcgaactattttcataaaccgatgcacagcgtcaactgctccgtagacctcgatgcagaagcgcttgtcggctataaaacgattgaaaatgaacagggacaggcgacaattgaattcgttcccggacctgtaacaaccgcaatgaacgagggacattttttatacattgacgaaatcaatatggcaaagcctgaaacccttccgattctaaacggcgtgctagattacagaaaaatgatgacaaatccctttacaggagaagtgattaaggcaagcgaaggattcggtgttatcgccgcgattaatgaaggctacgtcggcaccgttccgctgaacgaagcccttaaaaaccgttttgtcatcattgatgttccgtatattaaaggaagcctcctgaaacaggtgctgacctctcagtctgtcttaaaagatgagaaattaattgagcgttttatgacgctgtcttctgatttaatcgcacaagcgcataacggacaagtgtcagaagaagcggcgtccatcagggctctcattgatacgtgcgacttggctgcgtacatcccgccgaaacgggcgattgaaagaggcatcgtagaaaaacttgacgatgacagagaaaaagccgctgtcagaaatatttcagaaacgctgttcgaatgagggatatacaatgaagtttatcaaatttaatgacagcacgattgattcgtttttgttcatgatgctgactgatctggccaaaacactgaccagaagcagtgaagttgaagtggaatacggcgtgcagtcttactacaatccctttgaaaagaaaatttacatgagccacttttggaaagaccgatcagccggggatatggaagccggcctgaaaagcgatgtctatttgcgcgctgtcggaacacgcagcagctcatttcgggaatttgcggggtttttaaatgacgtttaccggcatttcacccgccaaagctttgccaagcagctgtttatgctgcttgaggatatcagaattgaagagctgatcaaaaaagaacggccgggaacgaaacgtgtttttcagaagcggagggagatgtacaggaaatatttcacgacgcagctgacattgaatttagaacggagcattttcaccgacgctttgtattgcgcgatgtttgtcaagctgacggctgagtctccgcttgaaggcattccttccatgcatgaacatattgatatgatgataccgtatattgaacgtcagctcatccgggtgtatgaggcggattctacggaacaaatcgcaagaataacggaagacctcatggaaggccttgatgaagtacttgagaaagatatgctgaacacgtacttttttctgccggaacttgattacgaaaaagcggctgaagagcctttattcgaaagtgtaaaaaaagcgccttcgttaagtgacgatctcacgctccctgagtcttccgacggagatgaagaaatccttgaagagaaaatgaatacgtggcaccgggaaaccgaagcgccgtcaaaaagtttccttcaatttgatattgagcacggcgcgaaatcagatcttgggaaagacgcggccagagaaggcgatgacggtgaccaggcgctcggctccgttcaaggttccgcacgtcagacgaaaagagaggattactccaaactggaagcgcttgaatccattcaggatgaacatgagggcgcggggctggctgacggaaaagaaaacaaatttgccttcccggtttatcaaacgcctcataaagcgtctcctgaagaggagcagtcttataaagaacaggcaaaaacgatagaatcatatcaaaaacgcttaaagcagatgatacaaaaaacacttgagcacaaaaaaacgctcccgcggaccgaccttcacgcaggccggctgaatcgcaaactgatccgctattttacggagcggaacccgcgccttttctataaaaagcaggacccgtcttcagacattgacgccgtttttacattgcttgtcgattgttcggccagcatgttcgacaaaatggatgaaacaaaaagagggatcgttctttttcatgaagccttgaaatccgtgtccgtaccgcaccagatcgtcggattttgggaagatacgaacgaagcgactgaaacgagccagccgaatttcttcaataccgtcattccgtttgaagagtcgctgctgcaggcggcgggtccgctgatcatgcagcttgcgcctgaagaagataacagagacggatacgccatcagacaaatgacgaaacagctgatgcggcggagtgaggctcaaaaatttttaatcgtgttttcagacggagagccggcagcattcggatacgaacaaaacggcattgtcgatacgagcgaggctgtcatcgaagcgagaaaaaaagggatagaagtcataaatgtttttctgtccaatactgcgatagaagaatcacagatgaaaaccattcaggatatgtacggaaagtacagtatttttgttccggatgtcgatcagctgcccgatgtgctgtatccgctcttgaaaaaactgcttcataaaagcataggataggctttttcctatgctttttcgctttttattttaaaatgatttaattttttcggtattgatctgttttttttactattttgtgaacaatcaaggtagaatccaaacgcaatcagtggtaaaatatccttggaagcgtttttattacataattttgggcacagcgttcaaaagttatttcaagatagtgaattgatcacttgattatctaggttgggggtaatattcaaatgtttcaaaataatatgaaacaaagaatgaattgggaagatttttacggaccgaacctcggctatgcactggagctgtacgaccaatatgctgaagatccagacagcattgatccggatctgaaagatatgtttgacgaactcggcgctccgccaagccaaataaaagaggcatcgggaacaaaggaacagggacgcgtcaccgcagatctgattcaaaagatcgcagcagcagttaaacttgcagaagatattcgaacctatggccatctgaacgcttccgtcaatccgctcagaaaggatccgaaaaagagcgagctctttccgttatccgagtacgggcttacagaagaagaaatgaaagcaatacccgcgtctgtcatctgtaaagacgcacctgccaatataacaaacggcttagaagccatccagcatttacgcaatacctataaaagaaccatctccttcgagtttgaccatgtgcatgatttcgaagagcgcgcatggattacaaaaatggtcgaatccggagaactgttccggaaaaattcaccggaaaaactgtcagccgttttagaaagactgacggaagtagaaggatttgaacaatttttacaccggacattcgtcggtcagaagcgtttctcaattgagggattagacgcgcttgtgccggttcttgacgacattatcgcccagtctgtgaaagcgggcacaaccaatgtcaatatcgggatggcgcacagaggccgtttaaatgtgcttgcgcatgtgctcggcaaaccgtatgagattattttctcagaattccagcacgcgccgaataaagaccttgtgccgtctgaaggatcgaccggcatcagctacggctggacgggcgatgtaaaataccacctcggtgcagacagacagcttcaggatgctgaaaccaaaagcgcgcggattacgcttgcaaataacccgagccatttggaattcatcaatccgattgttgaaggaagcacgcgggcggcacaggaaacaagaacgcaaagggggtacccggttcaagacgaaacaaaatcgctcgccattttaattcacggtgacgcagcgtttccgggagaaggcattgtcgccgagacgctgaacttaagctctctgaaaggctatcaggtcggcggggccattcatatcatcgccaataatatgatcggctttacaactgaaagcgatgaatcacgatccacgaaatatgccagtgatttggcgaagggctatgaaattccgatcgttcacgtcaacgcggatgatccggaagcatgcctgtcagccgttaaatttgcggttgaataccggaagcggttcaataaagatttcttaatcgatttaatcgggtacagacggtacggccacaatgaaatggatgagccgtcaacgacacagccgatgctgtatgacgccgtcagaaaacacccgactgtcaagcggatctttgcggaaaaactcgtaagtgaaggactgatcagcgaggaaaaagcgcaaaacatcgaaacgacagtgacaaaacgaattgaagacgcctataaaaaggtgcccgccaaaaaagaagacgccgtacgggaaattgaattgccggaaccggtgtccaacggttttccagacgttgacacagccattgattttgatgttctccgcaagctgaacggcgaacttatcaactggccggaatcttttaacgtgttcggcaagctgaaaagaatcctggaaagacgtgcaaaagcgtttgatgatgaccgtaaagtagaatggtcattggctgaatcgcttgcgtttgcttccattttgaaagacggcacgccgatccggctgaccggacaggattcagagcgcggaacgttcgctcaaagaaaccttgtgctgcatgacagcgaaacaggagaagaatttgttgccctccatcacttagacgactgcgctgcttcatttacggtgcataacagcccgctctctgaaggatcggttctcggctttgaatatggatacaacgtgtattcgcctgaaacgcttgtgatgtgggaggcgcagtacggggactttgccaatgcggctcaagtctattttgatcaattcatatctgcaggacgggcaaaatggggacaaaaatcaggactggtcatgctgctgcctcacggttacgaagggcagggccctgaacactccagcggccgcgtcgagcggttcctgcagctggcggcggaaaacaactggacggtggccaacctgacaagtgcggctcagtatttccatattttaagaagacaagcgaaaatgctgcttcgtgaggaaatccgcccgcttgtgatcatgacgccaaagagcctgctgcgcaacccgaatacggtatctgaagtgcaggaactgagcgaaagccgattcaagcctgtctatgagcagtccggtctttcccatgcttacgaaaaagtgactcgcgtcgtattatcaagcggaaaagtgtcaattgatatcagtgatcacttcaacaaaatggaaggcgataaggattggcttcatattgccagaatcgaacagctgtatccgttcccggcaaaagatacgaaggagcttttcgccaaactgccgaacctgcaagagatcgtttgggttcaggaagagccgcagaacatgggggcatggagttatatcagcccgtatctgacggaaatcgcgccaaaaggagtaaatgtccaatacatcggccgaagaagacgatccagtcccgcagaaggagatccgacagtccacaaaaaagaacaggaacgcattgtatctgatagcttgactcgcaaaaactaagggggaaatgaaaaaatggcggaaattaaggtacctgaattagcagaatcaatctcagaaggaacgatagcccaatggttaaagcagcccggtgattatgtagaacagggtgagtacttgcttgaactggagacggacaaagtaaatgttgaattgacagcagaagaatcgggtgttctaaaagaggtattgaaagattcgggtgataccgtccaagtaggagaaattatcggtaccattacagaaggcgctggcgaaagttctgcacccgccccttcagaaagtgctccagccaatgaacaaacgaaagaggaagcaaaagctgaacctgctgcacaagaagtcagccaggaagcacaatcagaagcgaaatccagaacgatagcgtctccggctgcacgcaagctggcaagggaaaaaggaattgatctatcacaaattccgacgggggacccgctcggccgcgtgcgcaagcaagatgtggaagcttatgaaaaaccggcttcaaaacctgcggcacagccgaaacagcaggctcaaaaaacacagcaaagctttgacaaacctgtcgaagtgcaaaaaatgtcccgccgcagacagacgatcgcgaaacgattggttgaagtgcagcagacttctgcgatgctgactacatttaacgaagttgacatgacggccgttatgaatctaagaaaacgccgcaaagaccaattccttgagcaaaacgaagtaaaactcggtttcatgtcgttctttacaaaagccgtcgtggctgcattgaaaaaattcccgctgcttaacgctgaaattcaaggcgatgagctgatcgtgaaaaaattctatgacatcggtatcgctgtcgcggctgaagaagggcttgtcgtcccagtcgtgcgtgacgctgaccgcctgacgtttgccggcattgaaagagagatcggcgaacttgcgaagaaagcgcgaaacaataaattaacattaggtgagctgcaaggaggctccttcacgatcacaaacggaggtacattcggatcgcttatgtcaacaccgatcctaaacagccctcaggttgggatcttaggtatgcacaaaattcagctgcgcccagtagcgattgatgcggagcgctctgaaaaccgtccgatgatgtacatcgctttatcatacgatcacagaattgtagatggtaaagaagcggtcggattccttgttaccattaaaaacctgcttgaagatccggaacagctgttgctggaaggataatttgagacagacaaaaagtacactgcccttacaagcagtgtactttttttattgagagaaggggagaatttatatgaaaagctgttatccgcttgagatcgaagctgaatataatgaagaattgcattctatcactccggttcttctgcaagacgaacatgacacgatattaatagactgcggatatcccggttttacaaaccatcttcaagatgctgctgcccggcatggaatgtcgcttcattcattgacaaaaatcattgtaacgcatcacgacatagaccatatcggctcactcgctgcattataccgtttgcatccggatgtcagcgtgacagtacatgagcgtgaagcgccgtatattgacggctctaaaaaatctttacggcttgagcaggctgaatcaacgttttgttcattgccagaggatgcaaagccttatgcaaaacagttcatccgctcgcttcaatcagtcgaaccggctccagttcaccggacagttactgacggcgagctgctgccttggtgcggaggcattcgcgttgtagccacgccgggtcatacacccggccatatcagtctttatctgcctgccgaaaaaactatggtcacaggtgatgcggtcgtcattgaagacggaaagctgaaccttgctaatcccggctatacgttacatatggatgatgcggtccgttctgtgcagcggctgctcgattacgatatccgccaattgatttgttatcatggaggtttatttcagggggatgtaaaaaaagcgcttttgcgtctgtttcgtgatctgcagaataaacaaggataggagcggcagcagcctatcctatccttgttcagttatgaaaacggaatctttgccgtttcttcttcttcggcgctgtttttctcttttttcttagaccagtaggtggcaagaacagaccccgacagattgtgccatatgctgaaaattgcgctcggcacggctgacaaaggggagaaatgcgctgtcgcaagcgctgcgcccagtccggagttttgcatcccgacttcgatcgcaatcgctttttgtgaagcataatccattttgaacagctttgcagtcaggaatcctaacaaatatccgattccgttatgtaagatgacgacagacacaatcagcagtcctgattgaagcaaatgctcacgatttacgctgacgacagaggatacaatcgctacgatgccgattaccgacacgagaggaagcgcgtgcacggcttgtccgacctgttttttgaagaacagcttcacaatcaccccgaggacgatcggcaaaagcacggcttgcataatggaaacaaacagtgagccgaaagaaacggggagccactctttcgcaaacagcataataagtgccggcgttacaataggagcaagcaatgttgagatcgtggtgaccgcaacagaaagcgccgtattgcctttcgccaaaaacgtcatgacgtttgatgccgtaccgcccggacagcatccgaccagaatgacgcccgcggcgatttctgcggggaggcggagcccgattgataaacagaaagccgtaagcggcataatcgtaaactgggcagcgactccgatcacgacatgccaaggctttctgattaattctttaaaatcgtctgcttgaagagtaagccccatcccaaacataataataccaaggaaaatcgtcatataagaactgatccaagaaaacaaatcagggcaggcgaatcctaaaccggcaaagacgataacccacaagccaaaggtttggcccgcaaacccgcttatttttttcagccattccataaacacagctccttttacattcaatcaatcagtcagaaaatatgactgacttttctgtattccattataaataattttctgaataattcaatattaaatgtaagttttcaataaaattattatgtaaactaacatcttcttgactattcagacatatattcttacaattgatttttatactgaaatgaattgggagtgctgaagtgaaagaagctaatcaatggtcatctaagctgggatttattttagctacggccggctctgcaatcgggctcggcgcaatatggaagttcccttacgtagcgggaaccagcggaggcggcgcttttctgcttgtttttattttatttactgttttaatcggactgccgcttttgcttgctgaatttattatcggcagaaaaacacaaaaaaacgccgttgaatcctataaggcgctcgcgccggggaaaaagtggcactggatcggatatctcggaatcattacgtgttttattctattatccttctacagcgtagtggggggatggatattaatctacattataaaaggctttacgggcggcttatcgctttcttcgggatttgatacgttatttatcgataccatttcaaatccttatgcagccgttttcggccagctgctgtttatcgtgctgacgattttagttgtggcaaaaggggtgagcagcggcattgaaaaagtaagccaggtgctgatgccggctctgtttattctgtttattctcttaatgatccgctccgttacgctgcatgatgcagcaaaaggattaaaattcttttttatgcctgattttggcgcgatggatgccaataccattttatatgcgatgggacaatcatttttctcgttaagcgtcggagtgtccgtaatggttacatacagcgcatatttagaaaaagaagaaaatattgttcaatccgccgtatcggtgacggtattaaatgtacttgttgctgtgatggcgggagtggcgatttttccggcggtgtttgcattcggcctcaagccggatcaaggcccgcagcttttatttaacgtgctgccgaccgtctttaaccaaatgccgttgggcatcgtgtttttgctcgcctttttgctgctgtttttatttgcgacgctgacatcggctttttcaatgcttgaaattttagttgctgttttgtcaaaaggcgattcggcaaaacggaagcgttatgcatggatcgggggacttgctatatttattgtcggggtcccttcggcgctgtcgtacggaattttgagtgatgtttctatttttcaccgcagtatttttgacgctgcggattttctggtcagcaatgtcttaatgccgctgggcgcgcttttaattgccgttttcgtaccgttgaaaatcccgaaacagatgctgtttgacgaactgaaaagcggttccggtataaaacgaaaatggtttgcagtctggctcctattaatccgttatgtggctcctgtagccattattatcgtttttctgcacgtgcttggtattttttaaaccaaaagaagcaggcccccgttcaagacgggggcttttttaataaagcggccatatcacgcggtgcgcttgctcgaaccgtttctccgcctcccgccaatcaacgacattccaccattgatccacgtaagccgctcggtcgtttttatattgtaagtaataagcgtgttcccacacatccagcggaagcaaaggaatgacgtcccactggctgtagagctgatgcttctcagcggccaaaatctccagccgcccggcgcgcggcgcccagactaggatagcccagccgactccttcgacttttttcgccgcttgagaaaattgctctttaaaagcggaatagcttccgaatgacacatcaatcatttgaaagagcgcccccgtcggccgtcttttaccgtttggattcatcgaaaaccagaaaatactgtgcaaataatggcccgcgccgtgaaacgccaattgccgcccccaatgtgccactaagtcgtactgtttcgtctgtctcgcttttttgagctccagttctgctttattcagaccatcaacatagctctgatggtgttttgtatggtgaagtttcataatctctcttgaaatatacggttccagtgcggaataactgtaaggcagtttagggaggacatgcttgccgatcggcacataagctctgcgctcatccggctcttcgggttcagtaatgtcccggtaaagtgccgatgcctgttcgtaccattccgcctccgttaatccatcatcctgaagggtgtgaaaaatccggtcgatttgtgccgcgaagcgatcgaaccgaccttgctgaataacttgttccttcaaggtttcacaccaattcagcatctcggtttgataagcgtgccgtttcatttttcttcctccttttcactcattttcataaaagtgctgagcgcaagcaaagaaaacacatacgggtagctgtgatacctgatgtaaaactccttcggcaggccgattccggtcggatagctgaaagcggctccttcgtaatgccggttttcaataagaaaagatatgccttttgtgacggcttgatgatgagttttttcgtattgcagcaaagcttcggccgcccaagccgtctgtacaagcgtcccgtaagaaagcggaacataggttttctcttctgcgcttttacaggattccccccagcttccgtcctcgttttgaatggacttcagccagcggatcgcttttttcacggccgggtggttttggctcacgccgcaagccttcattcctgtcagcgctgcccatgtgccgtaaatatagcagacaccccatctgccgtaccacgatccgtcctcttcttgatggcggatcagccattggacggccttttcaatctgagggtgatcagaagaaagccccgcttctcctaaacagtgcagcacccgtccggttaagtcgcttgttgagggatcgatggcagcttcctcagccgattccagcggcagcaggcgaaccagcggatgattgacatttttctcaaaagcagagaagccgccgtcactgttttgcatggacaaaagccagctcagtccgcgttcccatgaggcgggataaagttttcgcggaatggctttgagcactgcggctgtgtcatcacaatcaggattatttgtattgatgtttgaaaaaccccatcctcccggttcagcatgcgggttgtgaacggcccaatcagcgactttcgtctgctgccgttcacgcagaaaccgggcggcgctggttatcatctgatcgttatctgagatgccgcttttcataagcgcatagttgagaagcgccgtatcccaaacggtcgacgttgagttttccaggtacggtaaatcgccgcaagacgtgagcaaagctttcgtgccggcaagtgcttttctgataacgagggagtggcgcgatacaccgagagcgagcaggccgtacaccataaaaatagtggcgctcgcatagctgtataatgtgccgtcttcttcgatccggtcaagcatatacgttttggccgtacgcagaccgagctggtgaaaagcggcaggaatctgcaaaagccgcttccagtgcgcgaaaagagaagagaggtctctgttctcgtcctgatcggaacgaagccatgtaaacggatttttagtcatatgccgatctaaatgcgcgagagacggaacgttgggatttttcagcgaaaatcttttgttaagcgtcacggccatcggtacaaaatgaatacgggcgtatgtactgaactggtaaaaatgcagcgggaaggatgggggaatgactaagaaagataatggcagatgcagcgcgggccatggataaaggccgtttgccgcaagcatccactttgtcatgaagtgtacgttgcgcaagccgccatttgagatgataaagcgttcggcctgaatcatatgcgcctcagaacggctatataaaccggaagccagcaagccggcatagccctgtacagtggcggtcacatttcctttccggtcatcaggatagttggcaaaagttccgtccgggcgctgtttagcgcgaatgccttctgcaagctcagcgatcagttctttatcattgtctccaagagaagtgaggaggaggatcagaaaggcgtttgtcaaaatcggtccttcaaaacaaaatgaccatgagccgtccgcattttgcgtttctcttaatagagagatggttttcttttggcggcttctgacgttttcatgaattgtgctcacactcgctcaactccttcagaagcatatatattcatatgtaaaaggcggcatgacaaaagaaagaaactgctgacaggcagcagtttcttgtttgattaatcttccagattgatccagacgcttttcacttctgtataattatccagcgcgtaagagcccatttcccgcccgaggccggattgcttatagccgccgaaaggagatgccgcatcgaaaacattgtagcagttgacccaaatggtgccggcttggagacggtcagcaatgtaatgggcgtttttcacattctcagtccaaagtccggctgcaaggccgtattccgagcggttcgcccgctcgatgacttcatctaccgtatcatacggaatggcggctaaaacagggccgaaaatttcttcttttgcgatggtcatgctgtcatccacatccgcaaatacagtcggggagacaaaatacccttcttcaaacgggcagctgccgcccgcgacagctttggctccttccgcttttcctttttcaatatatgaaagcacgcgctcatgctgttcctgactgacgagcgggccgatttgtgtatcttggtgaaggccggcgccttgctgaagcgatttcgcatatgaaaccatttcgctgacgacctcatcatatttgtctttgtgaatgaagacgcgggagcctgcgcagcatacctgcccctgattaaacatgaccccgtttaaagcgccgggaatggctttcttcaaattggcgtcaggtaaaatgatgttaggtgactttccgccaagctccagtgtcacgcgtttaattttttttgcggctttttccatgatttttttgccgatttctgtagaaccggtaaaagcgagtttatcgacatcgtcatggttggtcagcgcttccccggccgtctcgccgaaccctgggacaatattgatgacgccgtcagggaagcccgcctgatctattaattccgctaaatagagggcggtcagcggtgtctgctccgccggtttcaaaacgattgtgcagcctgtggcaagagcggcgcccattttccacatcgccataaggagcgggaagttccaagggatgatctgccccacgacgccgacaggctcatggcgggtgtaattaaaatatgagccggcgaccggaatcgtttgtccggttatctttgtagaccacccggcataataacgcatatgctcaattgcgagcgggatatccccattcgtcgtttcattaatcggttttccgttatcaagtgtttcaagctgcgcgagttccgttttgtgctcttccattaaatcggcaagcttatacatcagcctgcttctggaagcggccggcatagtgcgccattcgccgtgatcaaaggctttgcgtgccgctttcactgcactgtcaatgtcttctgtctgtgcctcgtaaagcgtcatcagcgtttctccggttgccggattcggtgtgacaaatgttgatcctgaagcgctcggaacaaattttccgtcaatataaagtttcttcgtgccctgtaaaaatgtttccagcctttttgtgatctgcatcgttaaagaactcattcgtaacaaacctcccgaaatttttttatggtctgttttgagcatcttgatgtccgcgcaaagtaagcgcatacagtcattttataataacagccccggtaaaatcaattgataaccgttattgcaattcacaagaaaaaacggctacaataagcttatcgattaagaaaaggagttttataaatgattcataataattggcagacaaaagaaagcgtcaaaaaggtcaaatgcgtacatacagatgcgaaaaaatacattgtcaaaaatgtgctgacgccgggtaaagagtatgaagtcaaaaatgaaacagaagaattcatttttgttgtagacaatacaaacaaagtcggaggcttctacaaagagtattttgaagaagtttaaagctgaatgaattcattttgcctgagccatactaaaaaagactacatataaaaggtggctgcaaaatgaaaaaaacagagcaagacaaacaaaataaaacatcagatcagcttcagcaagtgcaacctgaagaaggcaccgacacgacgatggaacaaatttcagatacctataaagaaggaacaattgaagatacggatcgttgatgttttgttgaaaccgcggcattggagaagccgcggttttttatggcgaaaataaaaaactgacttttcgaaaaaaataccgttttcttgaaaccttttcttccgttgaaccgtattacttcataacagcggcacctttcgcgaagggcttttttgatgaacgttctaaaaatgtaatctgttcgtaatggtttaaatgccgtctatgtcgtattcttatatagggataaagaacttatttttttatgattgtaataaaacaatagtatagaagcagaaagtggggttcttcattgggaattttttctgtcagcagatcaaccgacacaaaaaagctggaggctttgctcgttgagggagaacggatcgaaacgatttataaactgcgggttgaccaaatatgctttacgaataaacgagtgattttctttgataataaaatgttctccaaaaagaaagtgcgcgtatttcttccatataaaacaattgaaagcttcgccattcaagaagcggggatgtttgatccagataccgggcttgtattaatgacaaggggaaaaactttcgaattggaatttgcaaaagaaacggacttgactgaggttcaagccatcttaacaaaatacttatgcagttaaatatcacataaaagccatccgaatgcatgcggatggcctttttattatataatgcttgtttttccggagttcgaatcaatgagatccggatcagcaatagaactgatggggatataaatcggcgccaaatcaccattttcttcaccgaatccgtagttgatcttattggataaaaaataatcgatttgctgatacgggccgatcgtaatggaagaaccgcggtcgactgcatttactttaaagcctcctacatttaccaaaaccggcgaaaacatcataatgggcctccttttccggcagggattttatcgcatgcagactcaaaggcagatggagaatcaatttgatcccggtcatccactttgccgttcgtgccgatgaagccgcttgcatctccgaagttctgtccgtatccctgattctttttatcagaattctgccattccgccagtaaattttgtccgacattcaccgctgaagcattttcaaaggaattaattttcaacatgaaaatattaatattgatatatggagttggttgaaccacaggcaaacctcctttaatacaggtgtatgccggctgttatgaccgtatgcttagacagggggcgataaaaatggatttcgataagatgaagcaatggatggaaatggcgcaaaacatgtccggcggcgacttttggaaaaacgtttttgatgatgaacaactgaaatcatttcaaaacggccattctcattttccctttcaacagggagatgggcaaatgagaagaaatgaagatgcttttcctcttatagatattgtggaaacccatgatgagctccaatttttactgtatctgcccggctaccggaaacaagatgttcagctgctgtcctacggagaatatatcgtcgtaaaaggcacgagaaaatccttttttaatgaacaggattttaaacagaagaccggaaaatacggcgattttgaaaaaaaactcgaccttccgcattccgctcagggaacaaagggaatgcaggcggtattcaaagacgggattttatatatatcgattgctaaacatctgggggatgcaagccagatcattatcgaaggctgatcttgtttgctgtgccatctatcagatctgaatcatcgatactcgtgatagggatgacgacaacggtgcaatcaccgttttgttcaccgtacccttcatttcttttattggctgctgtgtttctcaccataacggaagagccggtgttaaaagctgctccgccgctgattccgttcatttttatatactcaaaattgataacggatggaaaaaacatcatgattcgcctcctttttgtatatcatgtttatatattcgcaatgcggggcgcatagaactttccaagagtgacggggaaagaagtgattttctttgaaaaaaataatgaaagagattttcaaaaaagtgtgtgaagaagaattagaccggcttaagaaagtggaacaacagcttgatgagcttcaggataagtgtcattttgagccgcagacggtggaaggggaaaaaacatatgtccatattgagcacgtcaaagtggacaaggttgaatacaatattgattttgaaaatctgagtatagaagagctgagcggtatgctgaatatcggcgccacttaccatacaccggcgcacaggctcaaacaaacctgcgctgaagaatttggggacaacccgcaaaatgatgctgcgaaagaaaaaagacggacaaagcagcagacacccaatgtcaccatcagggggagaaagcattgaccccgttgtttcagcctcctttttcgagggtatgtattaacagatgcagcgaagaatacagacgaaaaaggagatgatgaatatgtcattatcaaaagaacagcaggacagcctttatcataaattaatcgatttaaaggaaagtcttcagggagaatcaaaagaaaatcattcaatgagtgaagacacaggagaactgtcgaacggagtagataaccacttagctgatcacggaagcatttatttggacagggtcacgaatcagacgcttgacggtgtcgatcagaatcttttagatgaggtgaacgccgcgcttgaacgaatggaaaaaggaacatacgggatttgcgagaaaacgggaaaagaaattccttatgaaagacttgaagccgtgccgtacgccagaatgaccgtcgaagcgcagcgagaaacagaaggggatgtgaaaacagacgctccgtcatatgaaagggaatttcacgagcaggtgaaagacctctcaaataaagaaaccgttgatcaaaaaagctcacaaacatacgaaatccttgatcgtgagcaggattcacaataatagcagcaggtacattcatatgtacctgtttttttattccataaaaaatctcaaaatcgaaataaaatcattgactttatataaaaaagaaagtaacatactatttgtaagtaaatattaaaagattaccgggaggaatttagaatgtctcaagtattatttgtaaaatcaagtgatcgtacggctgaagaaggcgtatccgtaaaattatacgaagcgtttctggctgcttataaagaaaacaatccgaatgatgaagtgatcgaacttgatcttcataaagaaaaccttccttacctcggaagagatatgattaacggaacatttaaagcttcaaaaggaattgaaatgactgacgaagagaaaaaacaagcgtcaactgctgacatttacttaaatcaatttgtcaaagctgacaaagtcgtgtttgcattcccgctttggaacttcacagtgcctgctgtgcttcatacttatgttgattacctgtctcgtgcaggagttactttcacatacacgcctgaaggccctaaaggtctgatgggagataaaaaagtagcgctcttaaacgcacgcggcggcgtatattctgaagggccgatggcatctcttgaaatgtcattaaacttcatgaaaaccgtcctcggtttctggggtgtccaagatcttcacactgttgtcgttgaaggccataatgctgcaccggataacgctcaagcgatcattgaaaaaggactgcaagaagcgaaagatctggctgcaaaattctaattttcattaactcttgcgcccctacagggtgtgagagttttttctattatagaagaaactggcggctgctttcgatctgatcttatattgatatattgatattttgtcgaaaaaacaatttttatgtagaataaagcatttttcacaaagaaaaaaggttttctgtaaaagaattaaccctcttgccaaaatacgactgatggtgtaggatataagagaagctacattgttcgtattgttaattaagttttaacctttaagctgtaatagggagttttatatcgaagccggaatgtcatgcctccattgcagaggacgacaggaacgcttctgcaaacacccactttgaggagtggtggtttaaaactttcttacttgcgtacggcatacgtagcgaaagccatttcccttgcggagatggctttttattttgaattgctcttgagcagcgtactttatcagtatgataaaataaaagaatcaaagacaaagtgaggttttacaagatatgctggagaaagcccaatcccttctggcgcattattttggctacgacagtctacgcgcgggccaaaagcaggcgatacaatcagttgcagaggagagaaaaaacacggtctgcattatgccgacggggggcggaaaatcaatctgctatcagattcccgcactgctgtttgaaggaaccacaatcgttatttcccctcttatttccttaatgaaagatcaagtcgacgcgcttgaagaagcgggtatcgcggcagcttatatcaacagtacccagacaagccgtgacattcatgagcgcctgaccggtttgaagcaaggggcttaccggctcttttacatcacaccggagcgtttgacttcttctgaattcattcacatcctgcagaatattacggttcctcttgtcgccattgacgaagctcactgtatatcgcaatggggacatgatttcaggccgagttaccggaatatcgaaatcctttttaatgaactaaaagaaccgcccgtcatcatcgcattaacggcgacggctacgcctgaggttcatgatgatatctgcaaacagcttcatattaagaaagaacaaactgtatataccggttttgccagagagaacttaacgtttaaagtagtaaagggcgaaaacaaagaccggtttatcgagcggtatctggaaaaaaataaacacgaagccggcattatatatacagcgacaagaaaagaaaccgaccgtttatatgagaaattaaaacacagcggcatcaatgccggccgttatcacggcggattggcggatgatgacagaaaagaccagcaggagcggtttcttaacgatcagatacaagtgatggtagctacgtccgctttcggaatgggaatcgataagagcaacatcaggttcgttttacacgcgcagattccgaaagatatggagagctattaccaggaagccggacgggccgggcgcgacagtcttaacagcgagtgtgtgctcttgttttcgccgcaggatattatggtgcagcgttttttaatagaccaatcggccgctggagaagaaaaacaaaagcaggatctcaaaaaactgagacagatggtggattactgtcatacggaagattgcctgcagcggtttattctgaagtatttcggcgagaatgaggcggaagcttgcggagcatgcggcaattgcactgatacaaggaccgcccatgacgtcacaaaagaagcgcagatggtattgtcatgcatcatcagaatgaatgagcgcttcggaaaaacgatggtggcgcaggtgcttagcgggtcaaaaaataaaaaagtgctggaaaacggcttcagcagcctgtccacttacggcattatgaagcatcaatccgcagcggaaatcagtgattttatcgaattccttatttcagatgaatatatcagaatggcggacggcacatttccgacgctaatggtcacccaaaaaggcagggacgttctgcttggaaaaagcgcagtcgcgagaaaagaagccttacaggccgccgccgttaccgaaaatgatgaattatttgagcttctccggcgtctccgcaaagaaattgcagctgaacagggtgtgcctccatttgtcgtgttctcagatcagacgttaaaagaaatgtcggcgaaacttccgaaaacagatcaggatcttctttccgtaaaaggggtcggggaacaaaaaagattgaaatacggagcggtttttttagaagaaatccgaaattatgtaagagaaacagagtgaaaaaaagtttttttagaaatttgcacattgtgtttttcattcgcgccggaaaaatcagaagcttgaaaacccttgctgtatcaaggtttcagcaagacttaccaagcgagagaaatgtttcatgtaaaggaactgtaatctaattcaaatcgttttgttattgaactgacattttcatatgttacgatatcacctgttagccgccaataaaaagctaacaagggaggatttacttatgaagaagacgattatgtcctttgtcgcagttgcagcaatttcaacaactgcatttggagctcacgcttctgctaaagaaatcacggtgcaaaagggtgacacgctctgggggatctcgcaaaaaaacggagtgaacctaaaggacttaaaagaatggaatcagttatcttctgatttaatcattgaaggagagaaactgactatttcttcagtagaaacaaccacatctgggcagtacacagtgaagcagggcgacagcctctggaaaattgctcagaaattcggaacatcagtcggcaatctgaaaagcttgaataacttgcaatcagatataatttacgcaggcacaacgttaaatgtgaaaggtcaggctcaggctgcacagccggctcaagaagccagccagccgcaaactgaacaaaaaccagctgccgagacagaacagccgaaacaagaagctgtcaaaaacgagcagcctaaacaagaacctgttcaagaacaacaacctaaacaagaagcgaaggctgtcgaagcaaaacagcagcctgttcaatcaaatacaaaccaacaagagcctaaaaagcagctgacaatgactgcaactgcttactctgctaacgacggcggcatttccggtgtaacggcaaccggtgttgacttaaacaaaaaccctgatgcaaaagtcatcgcggtagaccctagtgtcattccgcttggctctaaggtttatgttgaaggttacggagtggcaacagcagcagatacaggcggcgcaattaaaggaaataaaattgacgtatttgttgcaaagaaaagtgacgctaacaactggggcgtcagaacagtaaatgttaaagtattagactagtttcatatagagatgaagaacacaaggcgaaatgctttgtgttctttttttcttcccttttttgactgtatataatcgttatatgcggaaaaagaaaaagcgtttctctaatataataaggaatggatgtgaaaacggaatctgaagggatgtatgaatctgatggagccggaatttatatgtttatggaatgccttcacagaatcaccggtgtttcaagcaggtatatgcaccgctttcgccattgtgctcgttatcggactgtctatgcctgctgtcaggctgtttcaggcgcttgacagagggagaggaaggccagccgttattgaaaaggtgagacgtactggcgtgatgaagaatggcaggcacgagcttgtgcttattttaaacgtaaaaaaccaagacggaacgcatgataaacgtgaactgacacatgccgtatataatgaagagatcagccgtttttatgaaggagcttccgtatgggtgacggcagcggccggcggacgaatgatgatcgctccgcgcacaccgcggcataaggcgtcaaaataaaaagacggggcgtttttcccgtctttatgtattaatgccgatcgatccatatccgtccgccttctgagccggcttctatcctgcatgttcctccgatcgggaatgtcatcaaaggggaggtatggccgaaatcagcatttgcgataacaggcatggatgacagttcttcttttgtacggatgacggcacgcagagcctcctcagacacatttgaagcatgctggaaacgtccgatgacaattcccttcacggctgaaaaagcgggaaggtggatgagtgactgcaaatcccggtcaaacatatgaatgtccgacatataatcatcttctataaacagaatcacttgttccatctccggaaagtattccgtgccctgcagaagattcagcgtgcatagatttcctccgatcagtgttccttccgcatatccgggttgaataacgagcggtcccggattccgataaaaacgtctgtcctcctggttcaaataccatttatcatcactccactcggatgaaggctttacctcatacgggttgtcagaagcacagcaggccaagaaagagtcaatcgtatagtccagcccttttttcatggcaaatgaagaaaagtggggaccggaatatgtaataaggccggttttttgatatatggcatggccgagagcggtaatatctgaatagccgcaaaggattttcggatgccgcttgatgttttcataatcaagatagcgaagcagctgatttgattggaacccgccgagtgtcgtcaaaatcgctttgatgtcaggatcagcgaaagcttcgtgcagatcccgtacacgcgattcaatggatgatgaatcaaattcatttatttctttcgcatgctctgaaaaagagacacaaaagcccagctcctccaattttgtcttcgcggcatttatattttcatctgacataacggacatgcttgtggccggagacacaatacgaatgccgtcaccttttttcaatttttccggatacaaaaaaaaccctccttaaatggtttaatctattacaccatattaacgagggtttatctatcattttttacaggtcgacccatttaatgccgcctgattgcgtatcattgtcaatccagacatcaaagtgatgcttttcataaaaatgaatgagtctgtcgacatgatcccaatcacgcttagcgatgtcgcccgtcactttcgggatattctgctctctggcgatatgttttaaaaatttcatgcagatcgagccgtagccgtggttcggcgggcctttaatgtccccgatatgaatggcattgtcataataagaggcgatcagtgaaaaacagcctcttccccggtaggctgattcacaatcagtcagcataatcttacatgtttggccatcatcaatcgaggaaacaatgatccaatcgtcattgttcgattgatcaataccaagcactcgcgcgtcttttgatacatctatcagattttcccgcattctaaaaatctgaaattcaagtttatgaagctctttttccagctctttctgatctctttcttctgtagtaaacaaaatcatactcctttcacagcgtaaaagtcttagttaaacacaagtatccattgtagtaaatgatgtcttggtttgtaaatgggttttgcaaaaacttttttagaaaagtctgccgtttatatgtggattgacgtttttaaggcggtgcggatagggaaaggaacagtgagcagcggaaaaaggaggaatctataatggcaattgactcactcatcggcaaattgaagtacgtaatgacggaatctcctgataaaatgctttccttatatgtcaatacggatatgagaaatccggatcagcaggggggagagtggaaaatcgccttgaaaaccggttttcggagattaaaagagtatctgtctgccagtgatccggaagaagaaaaatctctcgtccgcatcatggaacgtgtctatcaatatatcgatgggcttggtaaagagatgccgcgaagtctcgtattttttgcatcgggagaaggcggtatttgggagacgattgaattgcaggtgcctgtcgaaacacgattttattgggaagagacggctgtccttgatcaattagaacttcttcgtgaacaatttccgagcacggcttttattctcacccagcagaatgaagtgaagatcatagaaaccgtactcggaaaaattgaaggggtggagcattatcattacgacgtcatcaatgaatcgtggaaaccgcaggatgtaagcggaaaccgctccgcgtcgatggacgaagacgctgccaaagcccacgtcgaagaaaaccaaaacaggctgtataaacgattggcttcaaaccttgatcaaaaggccgcttcacaccaatgggagcgtctcgtaatcgcaggggacaaagaaacagccgatattctcgatcagcatatgaataaaccgatagatcggatcattccaaaaaatctgttgaatgaaaacgaacataaggtgatagaagaactgttgaaggaagcataatatgacgaaaggccgggtctcaaacacccggtctttttagggcttaagtttgtctaatttctgacgaagcggacgaaaccgttgacatcaaagctgaattctcataccatttggatagtcagtaaaattgagagaggtcataagatgaatcagacagaaaacaaacctaaaagttataccggtatcgtgctgacattgaccgttctgatcaacgggttaattgcggtgctgttttttatgccgaaatcgggacaggtcagcattgccaatattcatattctgccgatgttaaatgccatttttaacagctttacttttatctttttgctggcagcgctctttatgattaagcaaaaaaatattcaagcgcataaacgttttattttggcggcgtttacgacgactctgctgtttttgatctgctatgtcgtataccactctgtggctgaaaatactttattcggcggccacggcatcattcgggggatttatttctttattttaattacgcacatctgtctttccgccgttatcgtgccgcttgcgctgtttacgctgatcagaggattcagcatgcaagtggagcgccacaaaaaaatcgcgagatggacgatgccgctctggctgtatgtcagtctgacgggtgtcattgtatacttaatgatctcaccgtattattaaaaaaagccgtgctctgcgcggcttttttctattgattgaaaaaggcgcctcatcagggcgccttttactcttcaagcgtttcaagtgttgttacatttaaggattgttcaacggtttttgtttttgcttttactttttctgcgtacgtgtaatcaccatagcagtagggataacggaaattgtctttgttccctccgcaagtgtaaagtttcggattctttttgacctgctgctcggagtattgttttgccagttcctcagtatgcgatcctccatgttcagccacgaaatcaatatagccggctcccatgttgtagctttgtataatcgtatccaagtctacgccttttttcttgcctgtttggtacatgagagtgaattgtttgattccctgtttgatactggtttgagggtttttaatctcatttcgctttaaacccagagattctgaagactgcatgggatcatttcctcttccttttgactcctgatatatcatgccgagtacaagcgatgtatatttggtgagtcctttttcatccagctcgtcttcaacaagcggtttgtaatctgtcagccgttcaaggacgatcggcttgacatcaaacggaagacttttgagccattcattatttgaaaatagcagaatgaggaagaaggaaaccatgacaaaaacacatatcatcataagacccgcggcagcgaaacagccttttttctttttctccactgtgtttcaccctcaatttcaggagcattatgactttttcattatgacacagatgaatgcgcgaaaccaagcggaaacccgtatttgaaacataaatttaaaataacggttcttttgtcaggcgcaggatgtatctgcatcaattgacatttggtataattgggctacttgagaaaagaagggtgaggtatatgactgaatttcacgaatccggaaacaaaaatgaccccgctgtcgatttagatgaggaaactttatttttggttgcccagacttttaaggcgctgtctgatccgaccagaatcagaattctccatttgctgtcacagggtgagcatgcggtaaatgatatcgcagaaaagctgaatttgctgcagtctaccgtttctcatcagctgcgttttcttaaaaatctgcgcctcgtcaaatcacgcagagaaggaacatccatctattattctcctgaggatgaacatgtgttagatgtgcttcagcaaatgattcaccatacgcggcacgattaaaaaacatccctgctttttagacagggatgtcagccgtactgactgttattggtttggtctctgctcgtttttaaaacataaaaagagaagccgctgtaatacactgcgatgaaataaaagatactgatggtcagcggatcggccccgaccgtttggctgtatgcctccggatgggtaaagtccgctgtgatccggtaaatttcaataacgcgataaacaaatctcgataggaataacgttaatagaataagttcaatccacaggtgagtgcgaaaatacatttttccgcggcgttcttcaaaagaaatgttccgtttagcaaacaggaccagaagccagccgcaaaaagtgccgaatataagatggccgtataaagccgggtgtgtgatgctgaaaaacgccagagctgcggccagcaatgaaaacaaaatcattcttgtataaagccagcggggtttcaaaggctgaaagccgacggaccgtttcacctttttatacaaaaaaaaggcaatcattaagacagggcagatgctttgaagtgtgatatgcatggtgtggaactccccctccgttgagtagtgtatgcttatccggctggttttagtagtctgatttattcgcaggctgaaagcatcttttatcacagtatgcacgtttctttttttttgcataagagaagcgcccgcgcctttttcaggatttaaacagaaaactcttgataaactaacggtattagttataataaactaatactattagtttttagggggatcttgatgagaatcttacaatacggaaccgtttggcagctgactttttttcccgcgctcttcccggtgaattgttatttggttgaagaagaagaaggagtaaccctgattgacgccggactgcctaacagtcataaaggaatcaaacaagcattgcggcagcttgggaagccgctgaatgacatattactcacccacgcgcacggggatcacatcggttcgcttgactcattagctgcggaatttccggatgcttccgtctgtatttctgagcgggattctttcttgctgaaaggtgacacttcattatttgagcatgaagcacaaacgccgataaaggggggagtgctgaaaaatgttcgaaccgaacctgatcgcctgctgaaaggcggcgagcggatcggatctttacttgtcatttccgctcccggtcatacgccgggaagcctcgcttttaaagatatgagaaatgatatgctgatcgtcggagatgcctttcaagtacggggcggccttgctgtttcagggaagctgaaatggaaatttccgtttccggcttttgctacgtggaataaagaagaagctgtaaaaacagcaagaacacttatcgctcatcaaccaagcagtctggccgccggacatggaaatgttctctgcaatcccgttgaaatgatggctgaggctgctgaggaagccgaacgaagcctgccgggaggccgatcataatgtcaccgagagtcggaatgagccttgacatgatattgagagccgcagcaggcatcgctgacgaaaaagggctgaacgaagtgacgcttgcggctgttgcaaagtccttaaacgtaaaaccgccttccctttacaattttgtcaatggccttcaaggaattaaaacagagctggctgtctccggtttaactatgttatatgaaaaaatggcggcctctgcagaaggactgacgggcgaaacggctttgcttgctctcgccgatgcctatatcaatttcgccgaagccaatcccggattatatgacgcaacatttcaaaagataaaagacggccggattgagaatctgtcaagcctgcttgtagagcttgttgtcaggcagctgacagctaacggatatgcacagtctgacactgcgattcatgctgcgagaggactgaggagccttcttcacggatttgccgtgttgagaaaacagagtgcatttgaattaaccaaatcaattaaggaaagccggaagtttgcagttgttgcttttctaagaggtttgcaggagagagaacaataatattattatgtaaactaaataaaaagacgtatcctgtaaaaggagggacaaatggattcattacaacatatcatttgtgagcggcgcacctattcacatatttttgattctcatgcacacacatactgccaaatgctctttccgctcgaaggacagctggacctggagacagaaagacgtaaaatcagattaaaacctgatcaaatgttgtatattccgcccgggcatgaacatcggttccgttctttggagcgaaatgaatgtctcgttctcgacataccggcatattttttcaaaggttcatttgcccctggcgttctgaataagcttgatcctttttggacatcgattcggtttctgctgacagaagagacaaagcagcagtcggctcattcattgagtctgcttgcagaatatattgctgaaaagatacaagaaaaccgtacaaatgattcaattgcgtatatccgccgaaatctctcaaagacttttacaattaaagagcttgccgcaatggaacattaccacccggcgtattattccgactggtttaaaaagcagacggggaaaagcccgcaagcttatattgctgagctccgaatgaagaaagcggaacaaatgcttattgaaacaaaatgccggctgacagacatcagtcaggaggtcggctttcaaaatttgtcttcctttaccagatggtttgtcagacataagggaataacgccgcgcgtcttccgaaacacctttcaatctgataaataatcctgaaaatcggttaaataaactgcttctttttttggtatcatgattgtaaaaaaggagtttttgatatggcagtcatcgaagattttatcaagcttgatcttagaataggaacggtcgtaaaagcggaagtattcccggaagcaaaggtgccggccattaagatgacaatagatttcggcgaagagatcggcataaaacaatcaagcgcccagattacaaaacggtacgaaccgggtgatctgacgggcagacaggttaccgctattgtcaactttccgccgcggcggatcgccggatttaagtcagaagttctcgttctcggcggcatcccggaaaaaggagacgttgtcctgcttacgccagagcagacagtaccgaacggaacgaaaatcggataataaaaaaagacgtttgcagaagcaaacgtcttttgcgtattgaggcgatacaccacacgccacattcgtgtgtgccgcaagggcatgtgcatcggcttacacaattcagctcatcgctatatcaatatagcatggcgggtgcggaaatgcaagagattttttaatatatgttatatctgcctttgttttgccgatccccgatctttcgtgtaaggttttctttgaaattttatgatcttgaataaagcagttcgacaaatgcaagagattcatctaatcttatatcctatggtaaaatttagacagaaagaagcagaaaggagccgtaaatgaaagtatttgaagcagcctcgttcatttcagccgcagaaaagcgggcaaaacaatacgatcagattagagaacaatttatcaatctcaggaaagcctatcagggaatggctgacttagacgacagtgagttttcaggcaaaggtgctgataacatcaaagcattctttcaagaccacgccggcgtcacagacagctggcttgatctgatcgatatgaaaatcgcgtttcttaacagtattttaggaaaagtagttgatgccggattagccgattcgtttgtggaagagtcctttttagaacacgagcttattcatgcgaagaatcaatcacaagccatcatgcaggagcagcggaatgaactcaaggacatcataaatgaaatcagcgatatcattcatcttgatgttttctctacagaagatgtcgatcaaaatctggaatcagcagacaaaaaacgggacgataccgtaaataggctcggaaagcttgatcacgatctaacgaaagaatacgcagaaaccgaggcaaatgaacatttcattcaggcagactttcaacagctccaaaacgctacgggcaaaggaaaaaacgccactccgcttcattataacgccaaggcatacagggaaagtgacatacataagaagaaaggcgagattgcaagacattcagatgcttatttgacgattaaaaaggaagaagcaaaagagcgggaaatcaaggatttgaagaaaaaactcgccgacggtgtaaccgacccggatgaatatttagaaattgcgaagaagatcggctatgaaaaccttgaaccttcccagcagcaacatgtcatgcagcttgaacaagcaaaacagctggaagaagccggagaagtgacttgggatatattaaaaggggctggcgttggtttatatgatgttgggaaagacacggtaaccggtttatgggacttcataaccgatccgggagaaaccttgtcagcactggggaatgcagtacttcatcctgttaaaacatatgatgctgtttcagcagcaatcgaggaatcgtatcaaaaagatatggtgaacggagatgcttactccagatcaagatgggtgacatatgcaattggttcagcagctgtggctgtcgtcggaacgaaaggagcaggagccgttaacaaagctgatgcggcggggaaagtcataaacaaggcaggacaggcagggaagaaaattaaagacgttaaacttccagaactgcttccttataactctaaatatgatcttgctctgtcgggtgacgtaccatacaatgtggttgacagccaaaaccttaaaaatcaacttttgaccaatgcaaagaaaatcccggatggaacgagaaagccgtttactggtcaagaaataaaccttccttggttaaataaagaaaagtatggtgctgttgaaatagacggcaaagtaaaagttaaaggacaaattagagatgtaagccgtagagtctataccttaaaggacattgatattaatcaaaaaactccaaaaggaaaaaccaacctggaattaatgaaagatggtaagtctccttatgctaaagacggaacacagattaacttacatcacctcatacaagaagaaagtggaccgttgcttgagatacctaatagtttacatacaaagtatagcgacgtaatacatggccttaaaggtaatggagaaagcttccggaatgatgtttacctggagaaacagtacaataactttaagacaaggtattggaagtggagagcaaaacaatatgagaaagaataaggggttataaaccatggatttttatttgaaagtaaaagaattcatagctgataatgcaaaagaaaaggattttacaggtgggattaaagaagataaaattttaaaaattgagcaagatcttcaagtcacgctgccggatagctacaaatggtttcttagaaactatggttctggcggggtttatggaatcgatttattaggctatgattttggcggtgcttcagttgtagaaacaaccagggaatatcatgaatataggggattgccaagtggcttagtagtcatagaacatgttgatttttttgggtattgtttagataccaataaaatcaacagtgaaggagaatgtccagttgttatttggagtgaattcggtggctataaagaacttaattctgcccattttataaagttcttttatgaaagacttcatgagatgaaagaaaactgggaagaagatgaagactgggacgattaataaaaaaaagctctcttttagagagcttttttcagattttcaatttttaacaggcttaataatgagcaaacaggcattactcaaaatactcgccgcgcctatccaaagcagccattgtgttgcggtcagccatgaggcagttaggataaagagtccaatggcaattgatatataattgccggctcggtccagtttacggttgcaatgaattttatatttagcatgagaaataaattgatcaattttatctttcagctcatagcatttttccttcattttatcctctgtttcttttacttttcgataaagcatattattcatcgtctgcactcccatatcgccgttttgaaaattcagccatgattttttcttcatagtcatctgagatgaattgtgcctgatcttcaactttcaaatgtgctttttcttcaaaaccatcctgttcttcaccatcaaaacgataaagtttttgcaatagcctccagaatgtttcaatttcatcagttgtgaagtcatgaaacatatccgctaaaaaataggtggatttttctgaacaggaaattaacgctttttttccttcagcggtaatctcaatattgattgcacgtttatccagtttgcttggcacagtgtgaacatatccttttttcgcgaggcttgaaattaatttgttagcggtttgttttgttgttcccagctttttagcgatattcataagtgtggtatcttccgtgggtaaatgggcaatagcaataagagtcatgtgctgtcgggaagtcaacatttctaagtattcgtccccccgagtctgcaccttattgacaaccgaaaataatgatgcgtaactttgttgcataaaatgcagttccttcattagtaatttaatatccataagttatctcccatctgaattgtcaccatgttgacaattacaatatacatcacaaagggaaataagtcaacatggtgactaatagggacgggtacggctgttttcaaaaatgtcacaggcagtcggagtgtttacaaaaggggaaataagtataataaatgcgaaaagggcattaatccaaagtgagaaggtgtttgacatgcagaaagtgaactggtcagaacggtatgaatggttcaataaacaagatgaaaaagacgggcgtttaatggcgctccttcgtcatgagcttacatatgaggaagtcatacggttatataagaaagggttttatttgaaatctaaagaaggggatgtttcgttacgtaagaacgatatctgtcgtatgtttggggttgaagagaggcagggcggcaaatcttaatgaacgggaagagaaaaaactcttcccgcttttcatagcagctgttattctttttccagcatggaagtcagccattctcttaatgccgtcttctgcacataccgctttccgtttctcgtgatatgcggaatgtcagaggtgtcaggcacgatttgtttcgcttcttccttggttactcctaaataataaccaatataatagtgtaaatctttttctttaatgagaatgtggtcagtgtgttcatgaggatcaggtgatttaaagtttttcaatccgtctcctatgaaatatccggctaaagcgattccgatgccggtaatgatatccatacagcaaacctccaataaacgtaatcattttttatacggtgaagccggccgaaggattcagccttcagcaaaaccgccgggcgtttattgcggacggttttgattgctgagcttttccacctgcacctttccggagaagaaaacagcgcctccgcccatatccgccagccgatcgggcgtgagcgaattgacgagctgttttttatcatccatatcggcccaaagaccttggctcaccgcaacgccgggaagcacctgttcgccgaccgaaactgtcaattcgcactctccgcggtgattccaaactctaacggtttccccgtcttctatgttccggcgtacagcatcctctctatgaataaaaagctttggcgctttttctaattttacgtgttttttattatttgaaaatgttgaatttaaaaaattatgattcggtcccgggacaaataaaagcggaaaatcgtcatcgctctcaagagggatgtgtgtcggcagcgccggataaccgtcctgtttcatcttttccgaatataattcaattcttccgctaggtgtcttgagctttcccggaaaaagcggttttttccgtttggctttcatgaaggaatggcgtgagagcgcttcgtaatcaatatcctcgatatacggattgtcgggaaagtccagcgcctgtctgatcaattcttcatcggaatcctgaagctcctgctcggtaaatcccattgctccggcaagcagacggaacacttccgtattcgatttgctgtccccgtagggttcgatcaccggtttttgcagctgaataaaatgatgccagtaagacgtgtaaaaatccgtgttttcaaaagcggatgaagcagggagcacgatatccgcatatttggcggtttccgttaaaaacagatcgtgaacgactgtaaataaatcctcccgcagcaggccttttctgactttattcgcttccggcgcaaccactgcgggattcgtaccgtaaataaacagggagcgcacggacggttttgtttctaaaagaacgcttccgagcctgttcatattaaatgatcgcggcttccgtccgtaaagcagatcaggccgctggagcgcttgtctgttatagtttaataccgcgctgttgtgcttgattgcgcctcctccggtgttgagccactgtcctgtaacagccggaaggcaggagacggtgcggacgatcattccgccattgtcatggtgctgaatgccgtttccgatcctgataagggaaggggaggtttccccgtacattctcgcaaggcgtctgatatcgtcggctttaacgcctgtaatagcagaaactgtttccggatcatagtgtttaacatgcgcttttaattcttcactgccttcggtgtattctgtgagaaatgcttcatcgtgaaggttttcgtcgaataagacatgcatgataccaagggcgagtgcggcatctgtgccggggcgaatgggaataaaccaatcggcaagccggccggtttggttcttatgtacatcgataacgacaatcttagccccttttttccgggctttttgagcaatcatgatttggtgcatattcgtgctgatggcattaattccccaaaaaataaaaagcttagcatgtatggtctcctccggatcagtacccgctccttctcccattgtatagttatagccttcagatccggctttgctgcagatcgtccgttcgagatgactcgctccgagacgatggaaaaaacggcggtccattccctctgccgccagttttcccatattgccgtaaaagctgtacggaagaatgctttccgctccttcttcggcaataagctctttccagcgcgcactgatcgtattgatcgcttcctcccaggaaataggcgcaaacgcggcttcaccttttttaccgatccgttttaacggaacggttacgcgtttctcatcataaatacgctcagccatgtgtctgactttgttgcaaatattccctgatgtgaccgggtgatcggggtctccctgaatgttaacgatttttccgtctttttttgtcacaagcaagccgcattgatcgggacagtctagtgagcataccgacttaaagaccccgttcggctgttttgcagcagaattcatagcccatttctcctctttgtttatattgtaagcattataacatttcaaaatcgaacgtcaattcagaaaaaaagtgttgacatcacggaaagacttttctatgatgagtttattcttttaaacagcctgacaatttcatcattttattttctatccagagaggtggagggactggccctacgaaacctcggcaacatttattgtgccaattccagcaagcgtatgcttgaaagataggaaagaatgatctatacatatttgtgcgcttcaagtgcataaagacggtatatgaatctctttccttctttggggaaagagatttttttatgaaaaaatttatgtgaaaaggatgttttgcaccatgacggttttaattaccgcaccatatcacgacgaggggctgaaggagctgactgagctgttcggccggactgtgcaccggccgtggaagaagcacggccgggcctatcgggaagatgaattgatccgaatgattcaagagacaaacgcgtcggggcttatcactgaacttgatgaggtgtctgagcgtgttattgacatattgcctgattccgcttttatcggtgtctgcagaggaatgccgtctaatgtgaatattgcggcggcgactaaaagaaaaatccccgttttctttacaccggcccgcaatgcccaggctgttgctgaaatgtttatcggaaatgtgatttcatttttgcgtcatacgtattcttcccatcaatggctgaaggacgggaagtggaatggtgattatttgcaggcttacgtcaaattcagaggaaatgagctgacggggaaaacagtcggccttatcggtttcggagctgtcggacagagaatcgcccggctattggccgcttttgactgcaaggtgctttactatgatccatttgtccgtcatgaaaaccgggagtatgaaaaaacgacgattgaacgggtattttctgaaagtgatattgtttccgttcacttgccgcgtacagaagaaaccatcggccttatcggcgcccggcactttcaattgatgaaacaggaagctgtttttgtcaatacgtcaagagcggcggttacagacagggaagagctgctgcgggtgctgaaagaacggcagattaagggagcgatccttgacgtgttttatcacgaaccgcctgaatcttctgattatgaattgatctctttgccgaatgtgttagcgactccccatttagcgggcgcaacatttgaagtggaagatcatcatgtgaagattttaaatgaagcgcttttcaaatggaaacaagatcaaacctgctcaatacgtgaactttataacaaaagagaacttgaaacggaaggaggaggctgtaatggctgaacaaaaaggctaccttgtatttgacatcgggacggggaatgcgcgagtcgcggtcgtgactgccggcggcgaagtgaccgcgcttgaaagggaagacattgaatatgtgacggatccgctttatccggacggacgatatttctcaccggaagggttatggaagcaaatcagcgctatggcaaggaaggttattggcaaaagccctcatattacattaatcggaatcacctctacaagccagaggcagggaattgttctgatcaataaagataaaaaggcatttctcggtctgcccaacattgataacagagggcgtgaatgggaagacgggattgaggcaaaagaagaagtgcatcagcaaaccggacgtcttccgagcgctttattttccgccatgaaacttgtcggattaaaagccagacagccgtctttatggaaagaagtgaagtacatcacaagcatcagtgactgggtgacatttgagctgagcggtattttaagctatgaaccgtcacaggctgctgaaacactgctgtttgacgtaaggaaaaaggcgtggtcagagaaattatgcaacatcttcggtgtgccttctgccattcttccttcactcgtccgatctgggacggttgtcggaatgttaacgttcaagaaagcggcggttctcggtctttctgaaagagtgcctgtgattgcaggcgggggagacacacagcttgccatcaaaagtgcagatgcaaagccgggagatatcgtcatcgtatccggcacgacgacgccgattacaaagataacagcggaggccggaaccgaaagtttagagaatgcatggctgaattgccatacagaagaaggtcaatggcttcttgaaacgaatccgggtgtaacaggactcaattatcaaaaattaaaatccattttttatccgaatgaatcctacggcgttatggaacgggaaatcgcaagtctgccgaaacatgatcatgcttgtatttctgcgttaggctcctatttatcgcctgagaaaaacgcactggcaaaaggcggatttatttttgacgctccgctgtcccaaaacttaagcagagcccattttgtcaaagccgcactgctggaaatcgctttttcaatcaaatggaactatgaggcgttaacagaggtggcttccttttcacaagatgatgtgaaggtgtgcggcggcggtttccaaagtgaagctttgacgcagtttcttgctaaccttctccaaaagaaaatctataagagagaggggttcagccaggcatccgcaatgggagcggcgatgatttgcaacgaagctctcggtgtgaaagcaaagctttcgagccgcacaaaggtaattgagccggaagcggatcagacggatctcttcctatatgaagaatggaaatatacgcaaaaattatttactcattttcagccggcggtgaaagcctgacttggggatgagatgacaacatgaaagattgctgaggaggaacaaaaatgcttaataaaataggaattccgaaacaactcgcatggggatttttgggagtcgtgctgtttatgatgggggacggccttgaacaaggctggctcagcccgtttttagttgaaaacggcttgacggtacagcaatcagcatccctgtttacagtttacggtatttctctcgctgtggcgtcttggttttcaggggtctgcctcgaagccttcggcgcaaagcggacgatgtttatggggctgttgttttacgtgatcggaacagccgcgtttatcgcatacggatttgaaaatcttaatttgccagtgatgtatgtcacgtattttattaaagggctgggttatccgctgtttgcctattcttttttgacatgggtgatttaccggtcgccgaaaaacaggctcagtacggcggtcggctggttctggattgcatattgctgcgggatgtttgtattcggtgcttggtattcaagctgggccatcaaatccttcggctatttgaatacactgtggagttcaattttctgggtatgcctcggcgcgttttttgctttgattttaaatagggaccgctttgaaaagaaaaaggcagataagcgggaaaaggcgcaggaattaatgaagggaatcaccatccttgctgaaaatccgcgcgtgctctctggggggatcattcggatcattaacagcattggtacatacggatttccggtatttcttccgatgcatatggcgcagcacggcatttctacaaatgtatggcttcaaatttggggaacgatctttctcggaaatatcgtctttaacttaatattcggcgcagtcggcgatgcattcggctggaaaaagactgtcatgtggttcgggggagtgggctgcggcatttttactcttttattatattatgctcctgttgtatcacatgggaacttgcttttcgtcagcattgtcggttttatatggggagggctcctcgccgggttcgttccgatcggggctatcgtgccgacggcggccggcagcgataaaggtgctgccatgtctgtgttaaatctggctgcgggcctgtcggcatttgtcggccccgcgcttgcctgggcgttcatcgggcttgtcggcgcacaaggcgttgtttggattttcgcagcgctctatttcgtaagtgcaatcttgacaaatcaaatcaaaatacctgaagagaaaacggcaaaacacaataaagcattgcctgaatacgcttcttaacagcaccgccccgaaaattcggggcgtttttttacagctgctgaagaaacccggcaaagcgctgaatttgttcacgtaacgattgtttgttttcgtgaaattgtttgaaacgatgtccgtttgctccggacggatgcgggaagccttccagaatgaccgcatgacccattctgccgttcttcttcagcatgcggcaggctgattctgctgctttgccgagagggataagcagaatgtcctttttcatcatttctatttcatccggaaaacatgtcagcgcgtaacggctgagaagagctgacctgctgattgccggccgatgtcccgtatagtttttctgtttataaaaaacagggtgtttgataacggacgttgtatgaagaagcccccgttttgaatcaaataaccgggatgaatcctcaacgtgaagcgcggccggcagaccgcattcattaagcatttcgatgaggttctgtctcattgaaccggaaagtccggccgctttttttgtttcataggctatcatttcaagtgtttcgccatcttttaaaagctgtgccgcttttttgtaagccagctgcatttgaaaaaaaccgggtgtgattccggaaatggcaacgactgcatgagggttaatatattcattatgaggcgaataatacaaatccagatctccgtccttggctaaatggaaagccggagtcagtaaatccgattttgtaaaccctcccgaagatgatagtgctttaagctgctgcaaaaaatgcgcaagccgctcacgatcgcaaatcatgttatgcctccttgaatccgccggtttctcttagtgtcatcaaaaacgtcggatgacatgcaggctcatacatcacttttaccggcgttccagagcatcttcaggacgtgaggcgttcctttaacttcggccgccgtcgtttgcacggctgtttttttagtgagaaaatcttctttcagctctttctgcttttgcgataacagatcggtttctgttttgatttcatcaacggccgtctgcatggacgctgtcgcggcgttaatcttctttatatcaggcgctgtgtttcttttaaaacgcacggcggatacggctgcataaatgaatgcgacagccgtaacggcagcactgatatacaaaatgatgatcatctgcttttcactcctttttttcagttgataccctttacggatcgtgttgaatcattttatttgctaattgttttttttctgcttataatgtgaaatcgtacataaggacattcagaaagggtgaaagacgtggaaagcatacagaacaaaacggctcttatcacgggtgcgggcagaggaatcggccgcgccgccgctatcgctttagccaaagaaggagtcaatatcggtttaatcggccgcacagaagcaaatgtcgaaaaggttgcggaagaagtgaaagcccttggtgtaaaggcatcattcgctgctgccgatgtaaaaaaccaaaaagaggtagagcaagccgtctcctctattaaagaagaactcggtgagattgacatcttgattaacaatgccggaatcagcaaattcggcggatttttggatcttacgcctgaagagtgggaagacatcattcaagtgaatgtaatgggtgtataccacgtgacacgcgccgttctacctgaaatgattgagagaaaatcaggagatatcattaatatttcttctacggcgggccaaagaggcgccgcggcgacaagtgcgtacagcgcttctaaatttgccgttctcggtctgactgaatctctcatgcaggaagtcagaaaacacaatatccgtgtcagcgcaatgactccgagcacggttgccagcgacatgtctattgaattaaatctgacagacggcaatccggaaaaagtcatgcagcctgaggatcttgcagaatacatggttgctcaattgaaattacatccgcgcattttcatcaaaactgccggtttgtggtcaactaatccttaaacaaaaggggacctgtcttcgtgacgggtctttttttgtttccgcaacccgaataaatgggcataaagatccgtttttgcagaaaaaagagtgaaaaagaaaccgatatcagctataattaaactaaataaactatgtaccaaatgttcattaaaattatttttccccgcctctaaaaaacaaatcaatacaaaccaaactgtccgaacaataaaagggaaaacgggatagaaagagaatatttagtacatggaataatttgttagaaggaagggtgtgcacatattgaaagaagaaaaaagaagttcaaccggttttttagtgaaacaaagagcttttttaaagctttacatgattacaatgacagagcaggaacggctttacggactgaagcttctcgaggtgctgcgttcggaatttaaacccatcggttttaagccgaatcataccgaggtgtaccgttcacttcacgaactattggatgacgggattttaaagcaagtaaaagtgaaaaaagagggagccaaactccaggaagtcgttctctatcaatttaaagactatgaagctgcgaagctttacaaaaaacagctgaagacagagcttgaccgctgcaaaaagctgatagaaaaagccatttcagataatttttaaatccggccggaacgcacccggcctcccgggctcaaaaggtgattctgtgattcattatacataatagcaggctcggaacaatacatatcaataataccctcaaacttgacatcaactcctgaagtggtaacataaaaaacgtgtgaaaaatacgaacaaaatacgaacaagggagatgttaccgatcttagatcaaaagaaagttgcttttatcggagcaggatcaatggctgaaggaatgatatcaggcatggtccgcgcaaaaaaaattcccaaccaaaacatctgcgtgacaaaccgccgcaatacagagcgactcgctgaattggaacatcaatacggtattcaaggcattgcttttgacagcatgaaaaccaaagacattgatgtctttattttagccatgaaaccgaaggatgctgaaatcgctctggctgcgctgaaacggcgtattcaacctcatcaaatcatcctgtctgttctggcaggcataacaacctcatttatacaacaatcattacatgatattcagccggttgtaagagtcatgccgaacacatccagcatgatcggcgaatcggcaacagctgcggctttcggagaccatgtctcttacggttcagcaaaaaccgcggtatcccttttggaatgcctcggggaagtgtacgtgatcaaggaagatcagatggacattttcaccggtatcgcaggcagcggaccggcatacttttattatttaatggagtttattgaaaaagcaggtgaagaagccggcttagacaaacggctgtcccgcaaaatcggcgcgcaaacgttattgggcgccgctaaaatgctgatggaaacgggtgaaaaaccggatgtgcttcgggaaaacatcacctctccaaacggcacgacggaagccggcctcgatgcgctcaggtcagaaggcggcggagaagccattgccaaagccatcaaacacgcgaccgaacgttctattgagatcagcaaaacaattgaaaaaacggcagcactataatcgttaaaaaacaggagtgatacagtgacgtctcggacgaagatcaaaagagtcgcggtgaaaatcggcagcagctcactgacgagcctgcacggggaaatcagcagaagaaagctggaagcattggtggatcaaatcgcacagctgaaagacagcggctatgaagtgattttagtatcttccggcgcagtggccgcaggttatcggaagctcggatttattcagaaaccggaaagcctccctgaaaaacaggcttctgcttccatcgggcagggattattaatggaggcttattcaaagctgtttttagcgcacggttatgtcgcatcacaaattttaattacaagaagcgacttttccgatgaatgccgctaccataatgtccgcaatacgatgaacgtccttttggaacggggcattattccgattattaatgaaaatgacacggtcacagtcaaccggctgaaattcggagataacgatacactcgcagcgaaggtggcaggtttaattgatgccgacatgcttgtgattttatcagacattgacggtttatatgatgataatccgcgcagcaacccgaaagcgaaaagaatcagacatgtaagtgacatcactccggaaatagaagcaagcgcgggagatgccgggagtgaaatgggaaccggcggaatgcgttcgaaactggatgcttttaaaattgtgatggcctccggtattaaaggctttctcgggcaggctaacattccggacattctgcttcaagcggtagatgaggcggctgaaggaacttattttgaagcggaaggaaccctgccgttaaaccacaaagaacaatggcttgcatttaattccggccccgaaggcgaaattgtgatggaaaaggaaagcagccgcgatgtcgcgaacggaaatatggagctgtcaccgcaggacatcgagcagattaagggcagattcagcagcggagcggttgtcaggctgcttgatcagcagggagaagagctcggactcggcatcgtcaactattcctcagcccagctgaagacatttaaagaaacgccgcacaaacagaccgatcaatcagtcattgatccggaagcgtttgtctgccacgttgaactatccattccgatcggctgagaaagatctataaaaatatgaaaaagcccgaggcttcgttttgaagctcgggtttgttttttattgatattgttcaagtttggagaaaaattgaatgacaaaatgatagaaatcatttgcagacggagccagttcccttccttttggtttaataatgcctacggtgcgcttcacttgaggaaattcaatcggaattttgaccgtgaaccgaggggtggtttctgcaaaggtgctttcaggtaataaagtaactcccatccccgcggagactaatcctttaatggcatctaaatcctcgccttccgtcgatacaagcggcgcaaagccggcctgtctgcaagcgtcaatcgccatgttacggagaataaacccttcaggaaataaaacaaattggtcgccgcgcagatcaattaaatgaatatttttctgtttggcaagcggatggtgcagcggaacaagcgcgtaaatcttttccgtgaataagatattgcctgttatgtcggggaattccgtcggaacggggccgagcagcgccgcatctatatccctgttccttaccgcttcgattaaaaacttataagacccctggcggagcaaaaactcaacgttcgggtattcctctttaaacgccgaaatcaccgtcggcaaaagctggcttgcaaggctcgtcggaaatcctattttgacggttccgcgattcggatcaagatattcatcaatttgttccttcgcgtaatcaattgctttcatcgccgttttaacatgttctaaaaattgtttgccgatcggcgttaatttaatatttctgccttcccgttcaaataaagtgacttgcagctcttcttcaagatttgcaatctgcctgctgatggcggattgtgcgacatgcagatgatcagccgcttctgacacatgttcccgttctgctacctccataaaataccgaagctggcgtaattccattgcgttcacacctatctatctcattttgagatgtatttgatctaaattatatattgtttatattgttttgaaaacttacaattaatttaaagttgtcagattttatgaccgataattaacggaaactgatcgggggagaggaattatgacttacaatcaaatgccgaaagcacaaggtctctaccgtccggaatttgagcacgatgcatgcggaatcggcttgtatgcccatttaaaagggaaaccttcacatgacattgtcaaaaaaggactgaagatgctttgccagctggatcacagaggaggacagggcagtgatccgaatacgggtgacggcgccggcctgatggttcagatccctgatgctttttttaagaaagagtgcggagaaatgagactgccggaaaaaggccgttacggggtaggaatggtctttttctcgcaaaatgaagaggaaagaaaaaagatcgaaaaacaggtgaatgcattcattgagcaggaaggacagatcgttctcggctggagaaccgtccctgtaaatgtcggaaaaatcggaacagtggcacaaagcacttgcccgtatgtgcgtcaagtattcatcggcgcctcaaacgatttgaaagacagccttgcttttgaacgcaaactgtatatcatccggaagcaggcggaaaattggggcgttcaagaacagcttgatttttacttcgcaagcctgtcaagccagactattgtttataaagggttgttaacgcctgagcaggttgacgcattttatttggatttgcaggatgaaaccttcgtatctgcattctcacttgtgcattcaaggttcagcacaaatacctttccaacctgggaacgtgctcatccgaaccgctatctgattcataacggagaaatcaatacgctccggggcaatatcaattggatgagagcaagggagcagcagttcgtttcagaaagcttcggagacgatcttcacaaagtgctgccgattttaaatgctgagggcagtgactcatccattcttgataatgcgtttgaatttttcgtgatggcggggcggaaaccggcacatacggcaatgatgctgattccggaaccatggacggaaaacactcacatgtctaaagcgaaacgggctttttatgaatatcacagctctttaatggagccgtgggacgggccgaccgccatttcgtttacggacggaaaacagatcggcgccatccttgaccgtaacggcctgcgtccggcacgttactatgtgacaaaagatgaccatattattttctcatctgaggtcggcgttattgaagtagagcaggagaacattcttcataaaaaacgtctggagcccggaaaaatgctgctcattgacttagaagaaggccggattatttcagatgaagaagtgaaaacagaaattgccaatgaattcccttatcaaaaatggcttgaagaagaattggttcaagtgaatcctgacccggaaatccgggaagaggaacaattcgatgatcttctcgtccgtcaaaaagcgtttggctatacgtatgaagatattcagaaatatttaatccctgttattaaagaaggcaaggacccgctcggctctatgggaaatgattcgccgctcgccgttttatccgaccgcgcccaatcactgtttcattactttaaacagctgtttgcgcaagtcacaaacccgccgattgacgcgatccgcgagcagctggtaacttctacggtgacctggcttggggctgaaggtgatctgctgcatccgagtgaaagaaatgcacgccgcataaagctttatactcctgtattatcaaacgaacagttttatgcgctgaaaacacttgtgcaccctgacattaagagccagaacatccgcacgctgttttcagatgacctagaaaaaggcctgaaggatttgtttcagcaagcggaaaaagcgatcaaggaaggcgtatctctgttaattttatctgacagggcaatgagtaaagagttgacgccgattccgccgcttttggccgtcagtgcgctgcatcagcatttgatccgccaaggtctgcgaacaaaagcaagcattatcgttgaatccggagaagcgcgtgaagttcatcactttgcggctcttatcggatacggtgccgatgctgtcaatccgtatttgacttacgctacgtataagcaggaaatcgatgaaggccggcttgatattccgtatgaagaagctgtcagcaaatacggaaagagcgtaacagaaggcgtcgtgaaagtgatgtcaaaaatggggatttcaactgtgcaaagttacagaggcgctcaaatttttgaagcggtcggcatcggtgaagacgttatcgccaaatactttaccggtactgcatctcagcttggcggaatcgatatcgagacgattgcgcaagaagcgaaacagcgccatcaagcggcgtacaaggatgattacagccaaacccttgatccgggaagtgaattccaatggcggaacggaggagagcaccacgctttcaacccgaaaaccatccatacgctgcaatgggcctgccgcaaaaatgattacagcctgtttaagcagtattctcatgcagcggatgaagaacgaatcggatttttacgcaatctgttcgccttcaaagaagaccgcaagcctttaaaattagaggaagttgaatcagctgcttccatcgtgaaacgttttaaaacaggagcgatgtcattcggttcattaagcaaggaagcccatgaggctttagcgatagcgatgaacaggcttggcggaaaaagcaacagcggagaaggcggcgaggacccgaaacgtttcgttccggatgaaaatggcgacgacagaagaagtgcgattaaacagattgcttccggccgtttcggcgtaaagagccattatctcgtcaatgcggatgaattgcagatcaaaatggcgcaaggggcgaagccgggagaaggcggtcagcttccgggcaacaaagtatatccttgggtggcggatgtccgcggttctacaccaggtgtagggctgatctcaccgcctcctcaccatgatatttattcaattgaagatttggcgcagctgattcatgatttgaaaaatgcgaatcgaagcgcgcgaatcagcgtcaagctcgtgtcaaaagccggtgtcggcacaattgcggccggtgtggcaaaaggcactgcggatgtcatcgtcatcagcggctacgacggcggaacgggcgcgtcgccgaaaacaagtattaaacatacgggtcttccgtgggagcttggtcttgcagaagctcaccaaacgctgatgctgaacggtttacgggatcgcgtggtattggaaacggacggtaagctgatgacaggccgggatgtcgtaatggccgccttgctcggtgcggaggaattcggctttgctacagcgccgctcgtcgttctcggctgcgtcatgatgcgagcctgccatttagatacatgtcctgtaggtgtcgcgacgcaaaatccggagcttcgcaaaaaatttatgggcgatcccgatcatatcgtaaactacatgctgtttgtcgcagaagaagtgcgtgaatatatggcgcagttaggctttaagacgcttgatgaaatgatcggacggacagacgttcttcatgtcagtgaacgtgcgaaagcgcattggaaagcgggccagcttgatttatccacactgctgtaccagcctgaaggcgtacgcactttccgtacggcgcaaaaccataaaatcgacgagtcgcttgatatgacggttattcttccggcggtgcaggctgcaattgaagccggacaggaagcggaagctgaaatcaagatcaataatacaaatcgcgtagccggaaccgtgacgggaagtgaaatttctaaacgctacggagcggaaggcctgccggatgatacgatcagacttcattttaccggatcagccggacagagtttcggagcatttgtccctaaggggatgacgcttcatttgaacggggattcaaatgactacgtaggcaaagggctttcaggcggaaaaatcatcgtgaaagcgcctgatgccttcaattgtgaaacacacgataacgttattatcgggaacgtcgcattttacggagcaacaagcggggaagcgtacattaacgggcgcgcaggtgaacgttttgcagtccgtaacagcggagtcaatgtcgttgtagaaggtatcggagaccacggctgtgaatacatgacaggcggccgggttgtcgtcctcggcgaagtcggcaaaaacttcggggcgggaatgtcaggcggtatcgcatacgtcctgagtgatgatgccaaagcatttaaacgcaaatgcaacatggaaatgatttcatttgaaaagctgacggatgaggcggagatcaaagaagtgcaagaaatggtcaaacggcatgcggcgctgacaaacagcaaaaaagccgcagatctcctggacaattgggaaaaagccgcagaaacctttatcaaagtcattccgaaaaactataaacaaatgctcctcagcatcgaagaacaaaaagcggcgggtttatcagaagaagacgcaattatgtatgcttttgaagccaatacaaaggtcctccaaacgcctgcgaaagatcataaacaagcggtagtacagtaagaaaggggagaggaacatgggaaaaccaactggattcatggaagaaaaacgagaaaaaccggcggagcgggaccctctcactcgcttaaaggattggaaagagtattcggctccattttcagatgaagcgtcaaagcggcagggggcgcggtgtatggattgcggcacaccgttttgccaaatcggcgctgatatcaacggttttacgtccggctgcccgatttataatctgataccggagtggaatgacctcgtctatcgggggcgctggaaagaagccttggagcgccttctgaaaacgaataactttcctgaattcacagggcgggtctgtcccgctccttgtgaaggatcttgtacgctggctatttcagatccggctgtttcaattaaaaacatcgagcggacgatcattgacaaagggtttgagaacggatggattcagccgagaattccagcgaaacgcacaggtaaaaaagtcgctgtcgtcggttcaggcccggcaggtctggcaagcgctgatcagctgaaccaagccggtcattccgtaacggtctatgagcgtgccgacagagccggaggcctgctgatgtacggcattccgagcatgaagcttgagaaaaatgtcgtcgaacgccgtattaaacttttgacgcaggaaggtatagattttgtaacaaataccgaaatcggcgttgacataacggcagatgagctgaaagatcaatttgatgccgtcattttgtgcacaggcgcccaaaagcagcgcaatctgctgattgaaggccgggaagcaaaaggcgtccattatgcgatggactatttaacactggcgacgaaaagctatttagattccaacttcaaagacaaacaatatatagacgctaaagggaaagacgtcatcgtaatcggcggaggagacacaggagctgactgcgtggcaaccgcgctgcgccaaaaagcgcgcagcgtgcaccagttcgggaaacatcctaaacttcctcaaacgcgcacgaacgacaatatgtggcctgaacagccgcacgtctttacccttgaatacgcctatgaagaagcgcaggcaaagttcggcaaagacccgagagaatattcaattcagacgacaaaaatggtggccgataagcagggccgcttacaagagattcacaccattcaaatggaaaaagtcagaaacgaattcggaaagtatgaatttcatgaactgcccgggacagaaaaagtctggcctgctcagctggtgttcatcgccatcggttttgaagggacggaacagccattattgaaacagttcggtgtcgattcggcaaatcataaaattcaggcggcatatggggattataaaacgaatgttgacggtgtttttgccgcaggggatgcgagaaggggccaaagcctgattgtatgggcgattaatgaaggccgggaagcagcgcgcgaagtcgacagttatttaatggggagcactgttttaccgtaaataaaggggtttatttataaaaccggctgggatcagccggtttttcgtattgaaatgaaacctccttcttcctttattggtcatataagggtaacgcggaagataacatatggaattttgttttacagagtggagagattgttttcttccgcagactgagacgatttgcaagccttgagcagttgatcacggtgctgctgacggtctctgtgtgtctgcagtcgatttgcgggcagatttgaattgatgaagaaaaacatattgaatttcaagcggaaacgcttataaacaaataaggaaacggacgggtccgctcctcttttttagacatccaaacgaaagccgatattgccgaactgccgtccttcccgcattctgttaaaagcggcagctgcttcactgagagggtacatgcggtcgataatggggcggatgccgcagcggtttaccaattccagcatatccgcgaattcctcattgcttcccattgatgtaccgagaatatgaatctgcggaaaaaacagcgagcgaataggaaatccgagatgatcgcctgaactggcgccaaatgttacgatccggccattcggtttcataatgtcaagatagtgttgaaacaaggccgggcctacaccgtcaagtatgatatctgctttttcgccattcagcgcctcattccagtcaccgtagctgccaatcgaccggtctgcaccgtatgacagtgcggtttgttttttgttttcgctgcgggaggtgacgctgactgtcgctccgatagcttttgccattaataaggcgtatgttgccacgccgcttccgatgcccggaaggataaggtgttcgcctttttttaattgtccttttgtaaataaggcgcgataagcggttaatgctgataacggcagcacgcccgcttcttcccaagtcaggtgttcgggttttaaaacggcattttccgcaggaacgatgacataaggtgaaaaggttccgtcgctcggaccgcctaaaatatcagggacggctggtacgtcctcaacagtcttccaattcagcaccgggttgatgatgacttctgcatgcagtaaatgagaccggacgccgtgtcctatttcggttacgattcccgcgccgtctgaaccgagagtaaattcatggtttccggtttcgtggtttttcattaaaaacaaatcacgatggtttaatccggctgttttcagctttatttttacttcgccgtttcccggccttttgtcaggtgcctgcctgaaatcaaagccattttcgtgtatgataagggcattcatcattcttctctcctttatgattgatgagaaagattttacaggctgtatcagctgcagtaaataaatgaaaattgatagccggctatcaataaaattcatagcaagaaggtgcccttacatggaaagcggagacttaaagatttttcaggctgtcgcccgcaaaggaagtatttcaaaggcggcagaaagcctgcattatgttcaatcaaatgtgacaaaccggattcagcagctggaacggcaattgcaaacacagcttttttaccgcacaaatcggaggatgacgctgacgcctgcaggtgaaaacttattgaaagacgcagacagaatccttcaattgctgcatgaggcgcaaaaaacggctcaagaagcaggcgatccgaacggcccgcttcgaatcggttctcttgaaacggcggcagtcgtccatctccctcaatttttcacagagtattgcaaccgctgcccgaaagtacagctgtctctgtcaatcggtgatacacataccttagtgcagcacgtcttacgctatgagctggatggcgcttttgtttatggtccggtcgaatacgaagatcttgagcaagtcgctgtatttcaagaagaattggtcttggtttcaaataagcgggaaggcagtttgcaagacttgttgcgagatccgattctgtattttgccgcgggctgttcgcaccgccgtaaaataaaaaacatactgaaagaagaggcagtgcccgcacataaaatcattgaattcggtacgttggaagccattattggggcggtgcaggcggggatgggggtttcttttctgcctgcatcagccgtccgttattttcaaaacaggaaaaatctttttcttcatgagcttcctgaacagtttcgggatatgaatatatcattcatctaccggagtgatttatttttgacatcggcgtttgaagaactgctgaatggattaaaagcattaccgaacggatgatgagaaaacaggacagctgtgtacgccaattttttcgttctggtttttctcaaaagaaagcgggtatccgggctgagcttgatcagcgtgatgaaaaactcggctataaaatcagagaagcacaaatgaaaaaaatcccgtatattgctgttgtgggagatcgagagtgccgccatcaatctgtacatgtacggcaatacgggcgggaagacacatttgaagagaatgtgagtgattttatttcccggatcataagagaggcaaaacaaaaaatagagatttaacaaaaacaacattgacatatcgtaaaatcacgatataataaagcgtatgaaacctattgatgtttttaaagcgttgtctaatgagtcacggcttgagattttacaatggctgaaagagccggaccgtcacttcgccccgcatgatggcattgatatgaatgagatcggagtatgtgtcagccagatcaccgataagcttcagatgacacagtcaacggcgtctcaatatctttccatccttcagcgggcgggccttatccaaacaaaacggattggcaaatacacctattataaaagagatgaagacgcgataaaggcgatggccgattattttcagcgcgaaatgtagggctgaatcctttagaagagggattcagtttctttttccgactacacatcgacatattgcgatttgtttctttttgttcaactctttatatcgatatatcacaatatatctttatataaatcatcaatgaaggagtgtgtcaggtgcaaaatacctggaagatttacattttggcaattatcagttttttagtggggacgtctgaatatgtgatatcagggatgcttgataaaattgcaggttccttgggagttactgtggcagcggcagggcagctgattacgattttttcacttgtttatgcaatcggaacgcctgtcatgatggcccttacagcaaaactggacagaaggaagctcatgatctatgctctggggctgtttgttatcgggaatatcatttctttccttgtgcagggattcggcttatttgcgggagcgcgggtgttcatggcgcttggagcaggaactgtggtggtcaccgcgcttacgatcgcagcaaaaatcgctcccccgggaaaacaggcaagttctctcgcaaccgtcattatggggtttacggcggcgctcattatcggtgttccgatcggaagaaccgtgtctgaagcttttggctggaaggtggttttcgccggaattgcggcaatcggaatcattgccatgcttattatacgtttcgcgttgcctgagataaaaggagataaaccggtgccgctcattcagcaattttctcttttgaagaaacgaaaggtggctgccgggctggccattacgtttttttggctcggaggctactcggttgcgtatacgtacctttctccgtatttactgaacgttactcatatcggaagcggaatactgagtacattgctgcttattttcggtgttgcaagtcttgccggttctaaagcaggcggtttcagcgcagacaaatggggggcgcgtatgacattaaccggcggaatggcgcttcatgctatcatgctcatgttattgccgtttgtcacacattctgctttcggagcggcggcagtgcttatgttttggtccttcgccgcctggtcatctgggcctgctcagcagtatcatttggcaacgatggagcctgaatcatcgggtgtattacttggcctcaaccagtctgtgatgcagctggctatggcggccggggcgggcatcgggggcattgttgtcacccatctgtctcttgcgtcagtgacatggatcggatcagcgggtgttgtcatcgcgatgtgcggcgtgctttcgcttgcgtcattaacgtctgaaaaaacctcatctgaatacagtgcagaataaacaaaagcctcatttctcagcttgagaaacgaggctttgtcttgtcatttttcacattttttcaagtttacgccgattgcggctccgtttcggcttgagtcggcaactccggtgaaggtgccgttttcacggtcaatcaggatgctttgcacattaccgatatcaaccgggctgctgccgaatttatgccccatttcgttcagttttgtgcgggcttcttccggcactcctttttcatatcgataggatgtcatgctgtttgtgtaaattctcggctcttcgaccgccgctttcagatccatgccgtactcaactttgttcagaatcgtttgcaggacggaagaaataatcgttgctccgccgggggagccgacagtcaggacaggttcgttatttttgaataaaatagtcggagtcatgctgctgagcggacgtttattcggctgcacttcatttgcgccgccaggcaccgcatcgaagtctgttaactcattattcaacacaacgccgtatccgggaaccataatgccggaaccgaacagctgttcaatcgttgtcgtataagatacgacattgccgaagcgatcggttaccgtgaagtgagtcgtttggccttcttgtttgtcagtcggctgctccacttgtttatagtttgcagaaccttcctgataggcccaagggtcgccggctttcggttttttattgactttatcaatatctatcagctgtctgcgggcattgatataatctggattcaagaggcctttgagagggacgttgacgaattctgggtccccggcaaatgcggcgcggtcagcataagccaaatgcatcgtttctgcgagaagctgatatttttgccaagaacggatatcatattgagaaagcttaaaatcatccaggaggttcagcatttgcaacaggaaaacaccgcccgagcttggaggaggagcagttgcgatatgatagccctggtaatctccccagatcggttcgtcaatcgtcacattgaagtttttaatatctttttctgtcattgagccgccgaattcctgcactgtttccgcaagctttttggagaatgctccgtcatagaatgcttttgtgcctttgtacttaatagctgtaaatgttttggctaagtctttttggatgagtgtgtctccttctttcagaggttctccgtccggaagaaacacgtcttttgcagcagtgtgtgataatttgtctttataatctgagatggcatcagctaaaaccgaatcgatcggaaagccttttgaggcaagtttaatggaaggggtgatgagttgtttcatggagcgtgtgccccatttgtcgagcgctttttcaagcccttttaatgttcccggaacaccgactgcagtccctttcgtaacgcgttcggagaaagggatggctttgccgttttcgtcaaggaacatatccggtgttgcgcctgccggtgcgcgttcccggctgtcgataatggtggtgtctttcgtcttcgcatcataaaccatcataaatccgccgccgccgattcccgacatcatcggttcagttacgtttaatgcgaattgaatggcaaccgcggcgtcaattgcattgccgccttttttcagcacgtcggcaccgatttgtgaagcgagagggtgggcggtggcaaccatgccgtctttgccgacatctacctgtttgtagtcgtcataggaaaacgggtgtttcttagcctgagcgtgataagggatgcttccggccgcgagcaacgtactgagcagaacgataaaacagagattcataaactttttctttttcatagtctgcctcctttgttttccgcttacaattatagagtaagtaaaatgtgctgttttcacaagtgacaaacggaatagtccggtgcgcaaaaagccggagtttctgtgtgaatgtaatcagtcgcaaataggctaaatgggaaaccggactgaaaaagctgtgaaacaagcataaagacaaaaaataagctacaatgaacaaaacagaattcactcacatgacatatgaaaggaacgtgagccatgtatttaacgatcaaagagacagcggagtttaccagtcttcctgaagaatatgtgcacaatcttgttttgacgaataaaataagggccgtccatgacggacagcaatatttaatcaacaaggaacaatttcaaacccatctcgaacagctggaaaaatataaggaaatgattcaagagtttttaaatgagccgcttcctgaagacattgatgtaaaagatgaagactaggacacaatttcatattgtgtcttttttttgcatttttttcggttgctcacaaaaaaacggatgctcagatttcattttaagtccgttgttttcattttttaatgccttgggtctctatttgtttaaaagcttgtcaccgggctgaaaatgatgtttttgaggaatttgttgaaactgcgtatctggttcaccttatgtaacactatgtatattatgttacataagaccctttatcctttatcattcaacgggtttcggctataatagtaacataatgctcaatatgttactttaccaattataaggggttttttgatgcatatcgtacagccgatccgaagtttggagaagatccaggaagtcaaacagtatttaatgaagaaaagtgatcgtgattattttttatttattttcggcatgaacagcgcactgcggatttctgatgttctgccgcttcgcgtgagagatgtcaggaacaaagatcatgtgtgggcaaccgaaagcaaaacgagaaagaaaagaaaaattctgatactggagtctttaaaggccgacatatacgcttatacaaaagacatgaaagaggatgactatttgtttaaatcgaaacggacgaataagcccatatcccggattcaggcatacagaatattaaaggaagcggctgccgcttgcgggttggaggaaatcggaacgcacacgcttagaaagacgttcgggtatcatttttatcagaggacaaaagacattgctgaactgcagaggattttgaatcattcttctccgtctattacaatgcgttatatcggaatagatgaagatacgacgagagccgcctataaagtgttcggagggctgtaggcttgaaaaaaacggccgccagcgttactataatagaagcaggctctagtagcacagcggatagtgcagcagtttcctaaactgcaggtcgggagttcgaatctctcctagagcgtttttggcataagataggcgcagcttaataatgtcggtaaaacagaaacccccttgttatacaagggggttttgagttgaatattttgtgaaaacctggtggaaatttatgttttgcacaaattttgcacattgctatgcaagtgtttttgcggccgtgttgttttttttaaaaaaatcaagggtattcgtttatcttcttacttcttaaccgtcaactgcttctgaaaaacagcctcccgttataatatgccagcatatcattgaaaaaagcccgctgtaagcaagcgggctttttccttatatgacagcatcaaattgattgactttccaaacgttgttttcttttacgaatgttacatcgcgtttagctgacggagaaccgtcaagagtcggcacagtgaagcggtatgtttgagcgcttccttttttagaaagaagagtcatttttgcttttttccaattcaggaggttatctccgtcgccgaccggaacagccaatttgccgtcttttacagtgaagtggtaatctttgagccctttgtcaatcgcttgctttgtaaaagcgggtgtcagatattttacggcttttgcttttgttccgaggtctttgcacataaatacatattgcagattttgatattcaaacggttcagaagtgcaattttcgtttgttttaagcgcaccgccgctcatcgtgttccagaaatgttctctcgctgacagggccagctgaagcgcttgtttttgtgtaaggtcattaggtgcattttttgcggtcgccgcagtgcccaatgacagaatcaatgtaatagtagtgaggaataatagccattttttcatgatataatctctccttcaatcaatctctttctcttatgttacaaatgttacaataattacgttaagattacaataccttttcagaaatattttccggactttttatttttatggtttgtttccgtgtaagacgtgagaaaaagataaagagtttcattgaacaaaaggtttttacaagctgtctgctgaataatatggaagaaaatcaaaaaaggagtcctacatatggaagtacaagatcatttagaaacagcggaaggccgcggccagtctgtctggcgatcgatgtcactgtttttagtgccgctgcttttaagcaatgtattgcaatctgtcggccaattggtcggaatggtatttgtcggaaggtggctcggagttgatgcgcttgccgccgtatcgtctttttttccgctgttttttctgctgatctcctttacgatcggaatcggttcgggaagttccattctgatcgggcaggcttacggcgcgaaaaacgaagagaggatgaaggcgattgtcggcactacactgacttttacctttatgctcggtgttgttctggcagttgtcggcagtgtgtttacgcttgatattctgcggctgatgggaacgccggaaaacgtaatagatgtcagtgtccgatatgcgcgcattttgttttgcgcaatgccgctgatgtttttatattttgcgtatacgacatttttacgcggaacgggagattcaaagaccccgttttatacgttaatcgtcagtacagtcataaacatcgggctcttgcccttattgattctcgggcttttcggacttccgaagttcggcatttacggttcggcgtatgcaaccgtgatttcaaacatcgtaacatttatcgtactcatggtttatttacggaaaagaaaacatccattggcatttgaccggactgcgctccgttctcttaaaatggacaaaaagctgctcgcgcttttactccgtctcggtattccgtcgagcatcaatatgattctcgtgtcactttctgaaattgcggtcatttcatttgtcaatcattacggatcaaacgcgacggctgcttacggggtcgtcaaccaagtggcgagttatgtgcagatgccggcggtaagcctcggtatcgccgtttcaatttttgccgcccaatccattggcgccaatcaattcggccggctgaaacaggtcatcaaagtcggcatcggcctgaattatttgatcggcggggtgttgatcctgctgatttacaccttctcccggcagatactggctttgtttttaacagatcaggatacactccacattgcccgcaatctgattatgattaccctttggagctatttgattttcggtcacgctcagatcgtttcagcaacaatgcgggcgagcggtacggtgttatggccgacgattatcagcatttttgcgatttggggaattgaagtgcctgtggcctttattctttctcattatacgaatctcggcattctcggcatttgggtcggttatccggcggcttttgtcgtcagcctgctgctgcaatacggatattaccggtttgtatggaagaaaaaacagattacccggctgattcaataaggttttaccgcacatcgctcagttcatacgggcgatgtttttttagagcaggaaaatgagtttagaaaatggaattcctatacatgctagaaaacaaggaaagggcaggtgcttatgacgattgaacatacgacttatttaggggtttcagccataaaagcggagactgatcaggctgaatgcatcattgtgccggagtggggatcaaatgtcatatcgcttcgggataaaagaaccggtatgcggcttctcagagaaccggaaactgcggagcaattccgcgcaaaaccgatgctgtacggcattcccgttttattcccgccgaaccggattacggacgggacgtttcgttttgacggccgcgcgtatcaattcgagataaacgaagaggataaacataatcatattcacggctttcttcacaatcagcattggaaagcggcggcagcgaaagaagagggggatggaatgacagtcgaaacagaaattgatctttcaaagattccccgtgttcataaacaatttccgcacgatgtcattgtccggatgacctatacattaaaagacaatgtgtttacgcagcgggcgctgattaccaacaatggaacggaggcttttccttgggggctcggctatcattccacatttgttttcaatgaagagcgatcccgtctttttctgacggctgaccgcatgtgggaattaaatgaacgtttcgtgccgacgggccgtttattggatgtgcctgataaagaagcgttccgtcatgggatgtctttgaaaaataaacagtttgacgatgtttttctttcttccggacggaacggcggcaataacgaagctgttatttctcatccggatgagaaattatccgttttgtatcaggcagacacgtctttcaagcattgggtggtatataacggtgacggaaagcaggggtttgtcagtcttgagccttatacttccgttacagatgcatttaatctgaatcagcctgcatcactgacagggcttcagattctgaaaccgggcgaagaagcggctgcgtcatccaggatcaccattttgcatgacgaagaataggaaagaggcgggataacattgaaaatatatgtgaaacgcttgagcgcggtgattctgcttttgatcattgccgcagttccttatattgatgatgcggctaaggcggctgaacaaaaaaatactttgcaaaaagagctggaacacattctggatgaagaacctgctttaaagggggcttcagcgggcgtcagtgtccggtcagcaaaaacaggggaggtgctgttcggcagccgggaagatatgcggctgaggcctgcatcactgatgaagctgctgacggcatctgcggcgctttccgttctcggagaagattacacctttaagacagaagtacgggcagacggcgccgtgaaaggaaaacagctgcgcggaaacctttatctcaggggaaaaggcgatccgaccctattgggttctgattttgagaagatggctaaacaggtcaaagccagaggcatccatgtcattaaaggagatctggtcggggatgactcgtggtatgacgataccaggtattcagttgatcttccgtggagcgatgaaggccaatattatggtgcgcaagtatcagctcttaccgcttccccaaatgaggattatgataccggaacggtgattgcggaaatcagcccggcaaaacagcccggtaaaaagccgcgcatttcgatttctccccatacggacgtcgttcgtgtgaaaaatgaagtgaaaaccgtcgcttctgatgaaaagaaagaattgacggttgaacgggagcacggtggcaatgtgattacgataaagggaaccatacctgccggctcggcacaggcaagagaatgggcggcggtgtgggatccgtcgtcctatgctttagatttatggaaacaagcgcttactaaacagggtataactgtaaaaggggaaatcagaacagggcgaatgccgcaccgcacccaacttgtcacatcacggacatccatgcctctttcagaattattgattccgtttatgaaactgagcaacaacgggcacgccgaaattctgatcaaggaaatgggaaaagtgaaaaaaggggagggcagctgggaaaagggcttggacgtgatgaaatcggagcttaaatcgttcgggctgaatccggatgaattgattgcaagagacggatccggcgtttctcatgttaacggcgtatccgccggccaaatcggagagcttttgtatgcggttcagaaagaaaagtggtacccgtctttccttcggtcgctccctgtcgccggcgcaagtgacagaatgacgggaggaacccttcggaaccggctgaagggcaccccggcggagggcaaaattaaagcgaaaaccgggtcactaacatcagtcagttcgattgccggctatgcagacacaaaaacaggagacacgcttattttttccgtgcttcaaaacgggctgcttgacgaagatgacggaaaagacattgaagacaaaatcgcagtcgtgctggcaaatcaataagaagggccgaatccttagaggattcggcttttttgatgtctgtaaaacattatattgcgattatgaatcaatcttttcaaaaagtaatatcggcaatatccttccttttttttacatgatactttcttacttgttcaccgatttttcattttttaacgtaaaacttcttttaaggaggcaaaacctttttaaaagcgcaattaattatacattttattccttattatagtgtttaagaaccagtttgtagtgtgcatacataccgttttacatggtataaagattatagaaatgaagaaatgaagtgaggaatatatactatattctaaaaaatgttagagaaaatttaattttttattgtgatttctaaaatatgttttaaaataatgcttatatggatgatttagtcatatgctgtcgaaatttaattgtaattatttcactttcttatcctcttaaattgaaatggagggattccattgaagaacactgtttattctttaactcacgcccaaagaagagtctggtttacagagctgctcgagccgggcacaagtatctgcaatctcgcggcgtgcgtcaaattcaggggggacatcgattttgacgtactgcgccatgctttagatttttctatctcgcaaaatgattcactcaggtttcaactgacagaaggggacggatcagaaccccagctgtatctggcggggcatcggccgatttctctagagactgttgattttactcatactgatcaggcagagcgggacgcatggattgacacgcagacccgtgttccgttcaagctgtttcattcacctctgtatcaatttactctgcttgtcatgtcagacgaagaagtttggctttattcaaaatttcaccatattatcatggacggcatctcgctcaacctgctcggcaaccagctcattgatatctaccaaaagatcatgcggggcgaggatttagctgaacatcacagaccttcctatctcagctacatggaaaaagaacagcaatacttacagtcttcccgttttcaaaaagaccgttcattttggactgaaacataccgaaccgttccggaacacctttcactggcggaacgaacctctcatcttagacaaagcactgcggcttccagagatacaatcactctttctcactccttagaacaatctatccggcgtttttgcaaagaaaataatatcagcatcatctctctgtttatggcttcgttatacatatgcatcagccgtctgacggctaaaaaggatattgccatcggcacttattacggaaaccggggctccaggctcgaaaaggatatgctcggcatgttcgtcagcacactgccgatcagaatgacggcagatcctgatgcggagttcctgtcctttgtccgcagcgtaggaaaagagcagctgtctgttatgcggcaccagaaatatccttacaatctttttgtgaatgaattaaggcagactcatcacgacctgcaaaatatcatcgggatttcgatgcaataccagcctctcgcgtggcgtcaggcagaaggtttcgattatgaaacggcgatgtttttcagcggacatacggcaaatgagctgtccattttaattaaggagcggacagatacgggattgattgagctgaattttgattatcaatccgctttatttactaaaacatcgattaaacgaattcaaactcatttgctgacgatcgttgaaaatgccgttagaaatccaaaccagctgattcggcatattgatatggcggatgaaaatgaaaagaaacgggtgttaactgcgtttaaccgtacagaagcggttgaaccgccggctccgacgcttcacgggctgttcacccgccgcgccgcgctttcgccgcatcgtccggcgctccgttttccgggcggcatgctgacgtacgctgagctcgatcagtacacagacaggctcgctgttcggctccgccaaaaaggcgtccgcaaagaaagcatggtcggcgtactcgctgaacgctcgccggagatggtggtttcagtgcttgccgtgttaaaagcgggcggcgcctatgtgccgcttgacccggactatcctgaggacaggctgcgctatatgctcgatgactgcggcgcttgtctcctgctttcacagccggggttatccgttcccggtttttccggcgagacactagaagtgtctctttctgctctgacaagtgagacggagacaggggctgtctctgaagaagcggatgccgattcgctcgcttatatcatttatacgtccggttcgacgggaacaccgaagggagtggctgttgaacaccgtcaggccgccgcctttttatcagggatgcaagggcagtttccgttaacggaagaggatattatcgtgctgaaatcatccttttctttcgacgcctccatctggcaattgttttggtggacgatgtccggcgcctccgtgtatctgcttcctgccggatgggagaaagatcctgtgcggatgattgaagctttttcttctgaaaaggtgacgaccgggcattttattccggcgatggtcaacagctttttagacgcgctggaaacagagcctgaggaaacaagaacacgcctcggcagaacactgacacgcgtgtttgccggaggggaagctctttccccgcttacggctgcccggtttgccgatctgttgccggagaccatgcttattcacggctatggaccgacagaagcgacggttgatgcggccttttacgtctgtgaccgaaaacgggacagcggacggacaaggcttccgattggtaaacccgttcctggtgcccgtctgtatgtatttgatagcggaggaaccatccagcctgcgggcgtggcaggagagttgtacattgcggggacaggggtggcccggggctatctgaaccggcctgagctgacggaggagcgctttctcgatgatccgttttatccgggagagcgcatgtatcaaacgggcgatatcgcacgctggacagaagacggccttgtcgaatggctcggccgttcagacggacaagtgaaagtccgcggctaccggattgaaccgggggaaatcgaagcagcgatccggcgcatcgacggcattcgtgaggcggcggtcaccgcccggaacgaacacggagataccgcgctttacgcctatattgaaggacgggaaagcgatgacgtgcgggcggagcttgcgacacgccttccggtctacatgatgccggctcagtttatagaggtgagcgaatggccggtcacgccgagcggaaagcttgaccgccgcgcgcttccggctcccggcggagcggcagacagacgggcgtacaccgccccgcggaacgtcacggaaatgaagctttgcgccctttgggaagaggtgctgaaaaacggcccggtcggtatccgggatcacttttttgagcggggcggtcattcgttaaaagcgacggctctcgtctcccgcatcgccaaagaattcggtgttcaggtgccgttacaggacatcttcgcccggccgacggtggaagagcttgcttcggttattcaggacttggaagagagcccgtatgaatcgattcagcctgcgcaaaaacaggacacctacccggtgtcttcggcgcagaaacggatgtatgtgctccaacagcttgaagacggcggtgtcggctacaatatgccggctgtgctggaactgacgggcccgcttgaccgcggccggctggaggagacgttccggcagcttgtggagcggcatgaggcgctcagaacgtcctttgaaacggggcctgacggcgaaccggtgcagcgcatccatgacagcgtgccgtttcagttggatgaggccgagtcagctgacgcattcgtccggccgttttgtctggaggaagcgccgcttttccgtgcggccctcgtgaaagaatcggacgaacgtcatcttttattaacggatatgcatcatattatttctgacggtgtgtccgtcaacaccttgattaaagaattcggcgagctgtacgcaggccgttcgcttgcgccgatgcgccttcaatataaagactatgccgtttggcagcggtcatttcaggagaaagaagggtatcagaagcaggaagcctattggctgaagcggcttgaaggagagcttccggtgcttgagcttccggctgacaagccccgtccggctgtcagaagctttgcgggcggcagcgtatcgtgcacgcttgacgctgaaacggcatccggccttcacggcattgcccgggatcacggctccactttgtatatggtgcttctcgccgcgtacaatacgctactcgcgcgcctgagcgggcaggaagacatcatcgtcggctcgccgattgccgggcgtccgcacaaagaccttgaaccgattctcggcatgttcgtcaacacgctggccatcagaacggagccgaaaggagacaaacggtttaccgattacttggcggaagtccgccaggcggcgcttgaagcgtatgagcatcaggactacccgtttgaagagcttgtggagcggctcggcgtgcagcgggacacaagccgaaatccgctgtttgacgccatgcttgtcgtccagaatatagagcatgaggaactgctgttggacggtttgcatattcagaatgcggacgtgtcccgtccggtttccaaatttgatgtcactttgcaggcttctgaaggcgggggacagattcattttctgtttgaatatgcggcgtctttattccggaaagaaacgatgcagcgctgggcttcccactttatgacgatgcttgaacacattgtccgtgaaccggaaacttctttacaagcgatcagcatgctgactgctccggaacggaaccggattctttcggactttaacggcatgacggatcaacagctgcctgaaaaaacagttcatgaactgttcatcacccaggcgcgaaaaacacctgatgccgcggcccttatcagcggggaaacattgatcacatacaaagaattagatgactggtcgaataaaatcgccagagccctgcaaaaacggcagatcggacctgatgcagccgtcggcattgtgataccaagatcgccggaacaagtagcggcagtcttcggggtgtggaaagccggaggagcctacgtcccgatagatcctgaatatccggaggaacgcaagcaatatatcatctcagacagcggcacagcgcttctccttaccgcacacggtgcgatagaacaagtgcctgatcgttttaacggtgaagtgctcgcactggaggatatccaagaacaggatgcttcgccggtccagtcattatcagcaccggaagatttggcttacatcatttatacatcgggaacgacaggcaggccgaaaggggttatggtcgaacatcgatccgtcagccaaacccttcaatggcggagcggattttatgatctgaatgagaaagatacgattcttcagctcttttcattttcatttgacgggtttgtaacaagcatgttcacaccgctgatttccggtgcgaaagcggccgttttagccgaagacgaagcaagagatattcttgctattaaacactatcttgcatcttaccgcatcactcacatgatcattgttcccgtactgtaccgtacactgcttgacgtactggagccgggggatgcagagtctctcagaattgtcacattagccggagaagctgtcgaccaaaacattatcagccgcagtttatcagtttgtccacacacggagcttgccaatgagtacggcccgacggaaaacagcgtcgccactacagcggcaagacatatagaacaaagtaagaacatcacgatcggccgtccgattgagcattcacacgtttatattttaaacggagatcatccgcagccgatcggcgtaacgggagaactttgcatttcgggttccggccttgcaagagggtaccgcaatcttcctaagcaaacggcccaagcctttgtccaagacccgttccagaagaaccggcgcatgtaccgcacgggcgacctggcaaaatggctgccggacggcacgctgcaatatatcggccgaatggacgagcaagtcaaaatcagaggctaccgggtggaactgaaagaaattgaatccgccttaacaggcataaaaggagtcaaagaagcagccgtcaccgctctgcccgcatcagcaggccaaacggaactatgcgcttatatcgtgacagaagaaggaacagaaagtgaaaccgtgcagaaagcactcagaaatgaaatgcccgcttatatggtgccggcgttctttgaaacacttgaagccctgcctgtcacaccgaacgggaagcttgaccgccgcgcgcttcctgagccgcggaaaaaagcgcacaccggacgggcatttaccgagcctgaaagcgacatggaaaaagaactgtccgcgatttggagcgaagtgctcggaactgaaaacattgccgcggatcaatcattttttgaactgggcggcgattccatcaaagccctgcaagtatcagcccgattacatcaggcaggaaaacagatcgccgtaaaagatattttcagccggccgacaattagggagctggcgccttatgtccgtacagagcggcagccggtcagccaagctcctgcagcaggagaagtgaagtggtcgccgattcacaaatggttcttcacacaagacatgaaggaagcaaatcattttaaccagtccgtcatgctgacgagagcaaattcaatagatgaagaggctctgaggaaaacgttaaaagctattaccgttcatcatgatgccttgcgcattgtctgcaaaaaagacgaagagaaaggtcttctcctcttcaacagaccggctgacctcgcagatgagcagctttacagcctgaccatattagaaatggaaggcgatgagcatgagaaggaacgttttgtaaaacgccgcgtcgcagagcttcagagaaacatggatttagagaacgggccgcttgtacaggcggggctgttccgctctgaagcagaagattacttgtttctgacggtccatcatctcgctgtcgacgggatatcatggcggattttattggaagacttggcttctgcttatgaacaggccatctctggacaggaaatcaaactccctccgaaaaccatgtcattcaaaacatatacggagcagctggccgattatgccgaaagtaaacagcttcttcagcaggcggagtattggcgggagattgaacactatgaaacagaaagtcttccttacgaacaggcagatttatctcaagctcctgcaaaaaaacggaacacggtatccttcactctgacagaaagtgaaacggacgccctgttgaaagatgtacacagcgcctacaatacggatacgcaagatgtgcttttggcttccgccgtgcttgccattcaaaagtggtcgccgcggcacgctttgaaaatcgcccttgaaggacacggacgccaatcggagcaggcaggtgcggacatcagcaggacagtggggtggttcacttccatttacccggtgcttttccggagcggagtttatgaacctcttgaagaaaatgaaattcgcacattgaaaaccgtcaaagacacattgcggcgcattccggataaaggcaacggatacggcgtcctcaaatatttaacaccgccgaagcttgccgggatgactttcgggaaagcaccggagatcagctttaattatctcggacaattcgatgcgcccggcgggaacccggcagaaacggaacagcctgacgcgtttcagttttctcctttgggaggcggagatgatgtgacagatacatggaaacgggagcagtcacttgaaatcagcgcgattgcggcaaaaggccggatgaccgtcagtatttcctatgaaacggagcgcttccggcaagatacgatcgaacagctgtccgaaagctgccggtattatctcctgaaactgtcggaacactgcctcggcaaaaccgatacggagaagaccgtcagtgactttgatgatcgggagctgactgaggaagcattgcaggatattgccgacttactcagcttccactaaaccgagcgggaggaacacatggacaaaacaaaaaatatccaaaatatttatcccctcagccgaatgcaggaaggaatgctttttcattcctttctgcaaaaggagggggctgcatatatcgagcaatccgtcttcaccataaaaggccggcttcgtccggaattgtttgagcaaagcgtacagtctgtcatcagccgtcacgatattttcagaacggtttttttacctcatgtcgctcagctgaacggcccccgccaagttgtgctgcgtgagcgggaattccggctgcaccgcgaagatcttacacatttggacgaagcggaacagagcgcctacttacagcgatttaaggaacgtgaccgcttaaaaggctttgacttgcaaaaggatatgctgatgcgcgtttctttgtttaaaacggctgacgaaaaatatatatgcgtctggagccaccatcacatccttatggacggctggtgcctcggcatcgtccttcaggaattcatgcatatgtaccgggcgattgaatcaggctcacccgtcacactggcacccgcaaagccttacagcacttatattacatggctgactgatcaggacaaagacgcggcttctgaatattggaaaggatatttagcaggctgcgagacaccctcaggactcccgaaaatatcggcccgtccccaggaaaaaggctaccgcaaggaagagctgctgttttctttagatcaaaacctgacggacaagctgaaaaccatcgccaaagaagagggcgctacgctcgctgttcttatgcagactgtatggggtctgatgctgcagcgctacaaccggacggacgatgccgtattcggcgccgtcgtatcagggcggccttccgtcattgacggcgtggaaagcatgatcgggctgtttatcaataccgttccggtacgcattaaaacgggtgacgaaagctttagagaactgctgggccgcttgcagaaagaaatgcttgactcagaggcgttcagctatcatccgcttgctgacatccaatcgcagactgagctgaaacaggatttaatcgaccatattatcgtgtttgaaaattatccgattcagcagcagatgaaagacgcggaaaaggaatcggatgcaccattccggatcgggaatgtcaacgtttcggaacaatcgggctacgattttaacctcatcatagcgcctggcgatgagctgctcatcaaattcagctacaatgcgaacgtttatgacgaagtatggatagagagcgtaaaaggacacttggaagaagctctgcgcggcgccgccttcaatcccgatgttcccgctgatcggcttccgatgctcggacaaaaggaaaaatcaagaataatcggcgaatttaatgacacgaaaacaacttatgaaagagatgaaagcatcatcagcctgttcagccgacaggtgaagaaaaccccgaaccatcaggcgcttcacgccggcgggctgacgatgacgtaccgggagctcgatgaacggtcaactgcattcgcccgcaccctgctggaaaacggtctggcgccaaagggaattgccgggattctggccgaacgctcaccggaatttatcatcgctgttctcgctgtattgaaagcgggagggacgtaccttccccttgatgcagaactgccaaccgacaggatcgccgatatgctcactgagagcggagcacagctgttaacggtacaaaaaggaattgagactgacattgacttttctcacatcatctctatcccggctgcagctgaaaaacaaacacctgatgcgggaaaactgaataccgatacagcacctgatgaccttgcctatattatgtatacatccggttcaacaggaaaaccgaagggcgtgatgatttccaaccgaaacatcatatcgctcgtgtcaaacagcaattacacgtcggctggcatgtcggaccgtctcattctgacagggtccatcggttttgacgcagtgacgtttgaaatcttcggagcacttttgaacggagcatgtcttcatgtggttgaccgctcgacaatgcttgcccctgagaggttcggcaattatctttcttccaaccggattacgattctgtttttgacgacggcactctttaaccagttcgcccaggcagatcccgagatgttttctgggttgcacaccttatatgtcggcggagaagctttgtccccggcgctcatcaataaggtcagacaccgctgtccgaatctcagcctttataacatatacggaccgacggaaaatacgacattttctaccttttacgaaatcaggcacgatttttctcagccgatcccgatcggaaaaccgatcagcaattcaactgcgtatatcattgataaaaatggcggacttgcgccgatcggcgtgcccggtgagctttgtgtcggcggtgacggggttgccaaaggctatttaaacaggcctgacttaacaagtgaagcatttgtcagccacccggttcatcctgaagaaaagatctacaaaacaggcgacttggcacactggctgcctgatggaagcatcggatacatcagccgtatcgaccgccaattcaagattcgcgggaagcggattgagccggccgaaatcgaagcgcgcttgactgaaattgatggaatcagggaagcggcagtcatcgtgtcagatgaaggacaagaagcaatcctttgtgcgtattatacgggcgcacatgttgaagaaagagccattcgatccctgttggccaggtcgcttcccgactatatgattcctcagtatgtgatgaagcttgaccgtatgccgcttaccgcaaacggcaaagtggaccgccgcgggctgcctgcgccggaacggaaaaaaacgtcatcaaaagccgttccgccacgaaactgggtagagcgtgagctgatcgacatttggacgccgatcctcggctgcagggagctgggcatacaagatgacttctttgagctgggcggccattctttgaaagcattgcaagtgattcatcagctgaagaccaggcagcagatggatgtgccgattgaaatgatatttgaatatccgacaattgaacaattggctgaaaagctgtattcaaacacactgacagaagctgcagagcagcatatcagcagactgaaccagccgaaaggccgaaatcttttctgttttccgcctatctcaggtttcgggattttctttaaagatcttgcggcggcattaaacgaacgggctgctgtgtacggttttaactttattgaagaagacagcagaatggaacaatacattgataaaatgctggaaatccagccggaaggcccttatattctcttcggatattcggcaggcggcaatacggcattcgaggcggcaaaagcgatggaaaagcgcggcttagaaatcagcgacgtcattatcgcagacgcgtacagaaagcttgacacattggcgccgcagccaacaaacgcgacagccgaaaatgtcccggaagccgtcagggaagcggtcatccgaaaaacagagcgctatcaaacgtactgggcggaactgataaatgacggccaaatcgcggcaaacctccattttatcgaggccggcataaaggaagagcacagtgataagaccgagccgatgaaatgggaaggcgccacaacgggactctatcaggaatatcaaggcgggggcgcccataaagatatgtttgaacccgcctttgcacagcaaaatgctgaggtcatactcgacatcattgcaaacagcggaagacgcttggcgcggaatctgtaacatccggcagaatggttcaggatgacagagggcaagataggggaatcaaaccagttttttggaggctttgacatgacgaacctatcttggcttacgtatgtaatgattattcttgccagctaccggctgacccatttgatcgtatttgataagattacggaattcataagaaaaccctttataaagcaagaaaaaaccgtcgatcaaaacgggcgcgccgtccaaaaaaaagttccttcctccgcattcggttatatgctgcaatgttattggtgtgcgggcgtctggtgcgccatattgatcggcatctgctacttggtctggccccgctatgcacatccggttattttcattttgtccatcgccggagcgcaggccattcttgaaacgtgtgtcggcgtcggaacgaaggtcattgacgtgctcgccgccatgaaacataaaaagtcctgaagcgttttgattcgctttaggacttttttctttcccttttaggctgagaggagcaaagcaggctttctgattcaccgcccggaatgcttcggaataccgtaaagcagagagggggaaaaacatgaaaagctgccgttttagcatgatatggtttttggccgttgtactgacagccggcatctttacattctcagcatccgcacaagcaagcggcactcagccggagagagaaatgagagccgtatggatcgcgtctgtcaccaatatcgactggccctctaaaaaagggctgtcaccggaagagcaaaaaagagaatacagcaagctgctggatgacgttcaggagatggggatgaacgccgttatcgtccaaattaagcctgcggctgatgctttttatccatcagattacgggccttggtcagagtatctgacaggaacacaaggcaaaaatcccggctacgatccgcttgcttttttagttgaagagacacataaacggaatcttgaatttcacgcttggttcaatccttaccggatcacgatgaatcacacaaatttgaatgcgctttcagatgatcatcccgctcgttcgcatccggactgggtcgctgcatacggaaaacagctgtactataatccgggcattccggaagtaagacaatttataacggatggaatcaaagaggtggtcagccgttatgacattgatgcggttcatatggatgattatttttatccttataaaattgccggacaggaattccccgatcaggcggaatacgaacggtacggaaaagctcactttgcatcagttgatgactggcgcagggataacgtcaaccggcttgtaaaagaaatcaaccaaaccatcaaacgagaaaaaccttatgtcaaattcggtatcagcccgttcggcgtatggagaaatgccgcagatgacccgacaggctccgaaacggccgcaggggtgcggaactatgatgatttatatgctgatacgagagaatggatccaaaaaggatacattgattacatcgcaccgcaaatttactggagcatcggatttaaagcggcggcatatgacgtcttagcggattggtggggaaaagaagtgaacaatcggccggtgcatttatatatcgggcaggcagcttataaaatcaacaacaacgctgatccggcctgggccgacccgggggaatacggaagacagattgctcttaacaggggatcagcttggattaaaggcagcatgcatttcagtttaaaggatttaaaccgtaatccgctcgatgtgaaaaaccgtttgatcaaagacatgtacagccggcccgcattaattccggagatgccttggctcggacattccgctttaaaaaaaccggctgtcaagcgggcggagaagaacgcttcaggccatacactctatatcgaagatgcgaaatccaacggtaaaaaaacgacttattacgccatttaccgcgcagaaaagggaaagcagccttatttagtggatacagtcagaaaaacatcgtcacggacgcagacattttcagatactgatattcgggcgaaaggagcctgcacctataccgttacttccgttgacaggcttcaccatgagagccgtccctccgcaaaacggacaattaaatagccattattaataaaactgacagttgcggcgctgtcagtttttttgtagcagatgagtccgaatgttcagactttatttggatggaatgaataaagacccccattaataaaatgtagaaagcagcagaaggaggaaggttaatgaattttcaactgacaaaagaacagcagatggtgcgcgaaatggtcagagatttcgccaaaaatgaaattgccccgaaagcccatgaggttgatcaatcagccgtcttcccgatagacacatttaaaaaaataggcgaactcgggctgctcggaattccgtttccggaagaatacggcggggcgggcggtgacaccatttcatatgcagcagcggtcgaagaaatcggaaaagcctgcggcagcacggggctgagctacgcggcggccgtgtcactcggtgcaagcccattatactatttcggtactgaacagcaaaagcaagaacatcttattccgcttgcttcgggaaaagcgctcggatcattcgggctgacagagccgaatgcaggttccgatgctggcggaacccagacaaaagccgagaaaaagggcgatgactatgtgataaacggagagaaatgctggattacaaacgcaaattacgcccgcacggtcattgtcaccgccgttacgggaaagaactccgccggaaaaccgatcatttcagctctcatcgtcccgacagacacaccgggatttacgatcacaaatccgtacgacaagatgggtgtgagagggtcggatacggccgagcttgtgctggaggatgtcagggtgcctgccgataacctgctcggtgatcctgaaaaaggttttaaacaatttttatatacattagacggcgggcggatctcgattgcggcactggctgtcggtatcgctcaaggcgcactggaggcgtcgctgtcatatgcgaaggaacgcaagcagttcggcagtccgatatcgtcatttcaagccattcaatttaagctggccgatatggcgatggaaattgaccttgccagacagatggtgcttaaagcggcatggctgaaggatcaaaacctgccatttacgaaagaagctgcattcgccaagctttatgcttcagaaatggccgtcagaacatgtcttcaggccatccaaattcatggcggttccggttatatgaaggaatgcggtgttgagcgcatgcttcgtgacgcaaagctgatggagattggcgaaggaacgtcagaaattcaaagaatggtcatcgcaagacagcttttgaagtgaaatgaaaacgtttactaagacagagatggaaggggggcaggtcatatggctgaacttatccatttaacagccggaaagctgcttgagcggaccgcgaagctttttccggatcgtgaagcggttgtttaccctgagcgcggccttcgttatacgtatgccgagtttgaccggttatgccggcaaaccgcaaaagggctgttgaagctgggagttgaaaaaggagatcatgtggccatatgggcatccaacattccggaatggctcgcggcgcaatttgcaacagcgaaaatcggcgccgttctggtcaccattaataccaattttcaaatcgcagagctcgattacctgctggcacattcagacgtctcggccctgataatcatggattcctaccggcagacatcttatgttgaaatcgtgaataagctgattccggagctgaaaacttgtaagcgcggcaggctgcgttcgaaacgttatccatttttacggacggtgttatatatcggtgataaaagcccgcccgggatgcaccgttgggattcattgctggataatgccgagtctgtaacggatgcagcgcttgacggaaggatggacagcctgaaaaaggatgattgcattcatatgcaatatacatcaggtacgaccggatttccgaaaggcgtcatgctctcacattttaatatcgtaaataacgcggccaatatcgcagaatgcatgaagcttacttcatgtgaccgtttatgtattcccgtgccgtttttccactgctttgggtgcgtgctcggcgtgctggcatgtgtttccgcgggtgcggcgatgattccgatcgaacagttttctccgccggccgttctgaaaacggtggagcaagaagcctgcaccgctctgcacggtgtaccgacgatgtttatcgccctcctaaatgacagccgtttttctgaatatgatctttcccacgtccgaaccgggattatggcaggctcgccatgcccggcggaagtcatgagagaagtgatcggcaaaatggggatgaccggcattacaattgcctacggacagaccgaagcatcacctgtcattacgcagacaagaacggatgatccgtttgaaagaagagtggaaacagcggggcgcgcgcttccccatatcgaagtcagaatcgttcggcccggaacatcccaagaagccgccaggggcgaacaaggagagctctgcacccgcggatatcatgtcatgaaaggctattataaaaatcaagaagcgaccgaagaagcgatagacaaagacggctggctgcataccggtgatttggcggtcatggacgaggacggatactgcaaaatcacgggccgtctgaaagacatgctgatcaggggcggcgaaaatatctatccgcgcgagattgaggaaatgttatatcggcatcccgcggtagcagacgttcaggtcgtcggcgttcctgatccgaaatacggagaagaggccgcggcgtggatcgggctcaaagacggacaaaccgcttccgcagaagacatcagaaccttttgcaaagaacatatcgcccgctataaagtccccaggtacgttttgtttacagatgaatatccaatgacagcctcaggaaaaattcagaaattcaagctgcgggaaaaaacgattgaagagctcaagttaacttaatgaaaaaggagtgcttcacatttgtttaaaaaagtcctgattgccaacagaggagaaatcgccttaagaattatccgcacctgcaaacgtctcggcatcccctcggcagctgtgtattcagaagccgaccgggacgcgctgcatgtaaaagcggctgatgaggcctatccgatcggtaaatcgagagtaaatgaaagctatttacatatcgacaaaatcatagaagccgccaaatccgccggagcggacgccattcatccgggctacgggctgctgtcagaaaacagcctgttcgccgaacgctgccagaaggaacaaatcacatttatcggtccgcccggtgatatcatcgccaagatgggcagcaagattgaagcccgaaaaacgatgcaaaaagcaaaggtcccgatcgttcctggtgtttcagagccattgcccgatgttcactccgccttagccgaagcccgtgccatcggttttccggtcatgctgaaagcgtccgcaggaggaggcggaatcggcatgcagatcgtacattcagaagaagagctggccaaagcgtttgaaggcaatcaaaagcgggccgcctccttttttggagacggcgcaatgtatatggaaaaggtcattgaaaatgcccgtcatattgaaattcagatactcgcagattctttcggcaacaccgttcatctgtttgaacgtgactgttcagtccaaaggcgccaccaaaaagtgatagaagaagcgccgtcgccgtttgttgacgatgaattaagacaaagactcggtgaaaccgccgttaaagccgctaaatcgatcggctaccaaaatgcaggcacaatagaatttctcgtcgacgaaaagaaacaaatctattttttagagatgaacacaagactgcaagtggagcatccggtgacagaagaaattacaggactggatcttgtggaagaacagctgaaaattgccgctgggcaggcgctgcctttctcgcagaaagatatcaaccaccgcggtcatgcgatagaagtgcggatctatgcggaagatccggtcaccttttacccgtcacccggtaccatctcgtctttttccgttttaagacacccgtcagtgcgacacgaatgcgccgtcgaaaagggaagcgtcatttctccgttttacgatccgatgattgccaaaatggtcgtcacggcgaatacgagaaaacaagccattgaacaactgaaaaccgcccttggcgaatatcatgtagaagggattaaaaccaacattccgctgctgacaaaaattgctcattcagaagtgtttgaaaagggcgaggcaacaaccggttttttacaaacaatgaacgagggggcgtccaaatgagcgtcataaaaattcaaatggcgggaaacctgtggaaaattcatgtgaagccgggtgatgtcattgaagaaggacaggaagtggccatcttggaatctatgaaaatggaaattccgattatcgctgatgcagcgggtacggtgaaagaagtgaaaaaatcagaaggtgatttcactgatgaaggagaggtcctgattgaacttcaataaaacgggaggtgcagcatgaactgtccgaaacatgtccgcatcaatgaagtaggaccgcgtgacggcttgcagaatgaatcggcgtgggtggatacagaagataagattgagtggatcaatatgctgtcaaaaacaggccttccctatatcgaagtgacatcattcgtgcatccgagatggattccggctcttcgtgacagcctggacgtcgcaaaaggcattaccagatctgaacatacggtctacgcggctctcgttccgaacctcatcggtctggagcatgcggcagaaggcggaatcgatcaggcatgtgtatttttatctgcaagcgaaacccataaccaaaaaaacgtaaacaaaccgattgaccggaccgttcaagagctcaggcgggttattactgaagcaaaagctgaaaaaatggcgacgagagcttatctgtccactgtgttcggctgtccgtacgaacagaacgtgccgatcgaacaagtcatccgcctgtcagacaccctgctcgaaatgggtgttgatgaaatatcgctcggcgacacgatcggcgcggcaaaccccttgcaggtcatagccgtgcttgaagcccttttgccgagaattcccgcctcaaaaatcgcactccatttccatgatacaagaggaacggctctagcgaatatcattcccgctcttgatatgggcatcacatcctttgatacttcctcaggcgggcttggaggctgcccgtacgcccctggatcagcaggcaacgctgccacagaagacgtcatttatatgctcgaacaaatggggattgataccgggacggacatgaataaacttctttatgccgcaggctggatcgcggataaaataggcaaagacctgccaagcagaaacctgcaggcattcagaacgaaatgagaaaggagaagccatgggagattgcgtcttgtattccgtctgtcaagaaacgatcggtctgatcacgctgaaccgcccgcatgcggccaactcgctgtcttcagacatgattgatcatttacagcgtgtgattgaagacatcaaaaactcgccatccattcgttgtgtcattctcaccggcaccgggaacacattttgcgccggtgctgatttaaaagaaagagcggggatgaatcatgaacaagttaagcaaagcgtcaggcgtatcggtgaaacggccgcatccattgaagctctcccgcagccggtcattgcagcgctgaacggaaccgctgtcggaggaggccttgaactcgctctcgcctgcgatatcagaacagccgtcagccaggcgggcctcggccttcctgaaacagggcttgcgatcattcccggagcgggcggaacgcagagactgccccggcttatcggccccggcgcggcaaaagaattgatctataccggccgaaggctttctgccgaagagggaaaagacatgaagatgatcgagcatgtttgtgaagccgatgaacttatggaaaaagcaaaagcactggccggccgcatcgccgctaatgggccgatcgccgtcagacaagcaaaatccgcgataaacaagggtctggagacagatctcaatacagggctcgaaatcgaacgaaaagcatatgaacaagtcatccccacacttgacagagaagagggcctgcgcgcttttaaagaaaaaagaccccctgaatacaaaggaaaataaaacatggagggactcggatggattacgaaaaagaacggcagacacgcagcaaaacgattgaaaagggaggagccgcgaaatatcacgcaagcaacgaaaagaagggaaaactttttgtaagagacaggctgaagcttttattcgatgacggcatatccgttgaagacgcttttttcgccgagtgcatgtcagacggactgccggctgacggggtcgttaccgggatcggaaccatcggcggcagaaccgtttgtgtgatggcaaacgactcaaccgtaaaggcgggctcgtggggcgcgaaaacggtggaaaagatcatccgcattcaggagacggcggaaaagcttcagtgtccgctcttgtacttagtcgattccgcaggtgcgagaattacggatcaggtcgacatgttcccgggcagaaggggagccggccgcatcttttataatcaagtaaagctgtcgggccgcattccgcaaatctgtttattgttcggcccttccgctgcgggcggcgcttacattccggccttttgcgacattgtcattatggtcgaaggcaatgcatccatgtacttaggctccccgcgtatggcggaaatggtgattggcgagaaagtatcgcttgaagaaatgggcggcgcccgtatgcattgttccgtatcaggctgcggtgatctcctcgccccgacggaacaggaagcaatcatgatggcgcagacatatctcagctactttccggcaaattatactgaaaaagcgcccgtcaacaaatctaagaacccgaaagcttttgaaaaaccgctctcagatgtcatcccggcacatcaaaacgcaccgttcaacatgatggatttaattgaacgtgtcattgatgaagactcattttttgagattaaaccgttatttgcgcaggaattaataacggggcttgcgcggattcacggacagccggttggcattatcgccaatcagccgcgtgtcaaaggcggggttttatttctcgattcggcggataaagccgcaaaatttatcgctttgtgcgacgcattccatattccgcttctgtttttagcagacattcccggattcatgatcggaacgaaggttgagcaggcgggcatcatcaggcatggcgcaaaaatgatctccgcaatggcggaagcgactgttccgaagctttccgttatcgtcagaaaagcctacggtgccggattatacgcgatggcggggcctgcttttgaaccggactgctgtttagcgcttccgactgcgcaaattgccgtaatgggtcctgaagcagcggtgaatgcggtctacgcaaagaaaatcagcgagctagcccctgaagaaagaccggcttttattcaagaaaagcgtgatgaatataaggaagacattaacctttaccggcttgcctctgaaatggtgattgacggcattgttcctgctgattccttgcgggatgaactcaataaacgcctcactgcttacatgtccaaacaactgacattcacacaccggaaacaccccgtatacccggtataaataaaaaaaagactgcacagatccggctcacagccgttcttatgcagtcttttttcacagtcttgatctcattttctttacaacaaaataaacaacaataaatacgagcgccaatataatgatcggagttgtatacattccggcatagctgtctacgtctttccactgtcccccgagctgatacccgagataaacgaaaatgacagaccacggaataatggcaagcgtcgtcaatatgacaaacttggaaagaggcattttcgcaaggccggccgggatggaaatcgcatgtctgacgaccgggataaaccgcgccgagaacacaacgccggcgccgtaacggcgaaaccagttttccgcaacatcaacatgatgctttttcagaagtaagtacttgccgtacttgtccaaaaacggccgtcccccataacgggcgatccagtaaataaagcactgcgcgatcgttcccccgatcacaccggcgacaatggcgccgataaagctgatcgtaccttctgacaccatatagcctccgtaagccagaacgatttcactcggaatgatttcgatcattaatccgagcgcaatccctaaatagcccatacttgtcagccaggataatatttcactaataaaattgcccacactgttcacaacctctttatctttttacccaattatatgactgattgacaagcaaaatggttacaaattattttttagcgcacgatttcttcagattctctttttaacacctcttctaaataagctaaaagtttcggtctcatttcttcccgcagaagcccgatctccgtgccggccataaaacagccgaacttatctcctatatcaaaccggcttccttcaagctcccgcgcataaatgcttcgggtgcggcacacttcgcgcagcgcgtctgtcaattggatttcgttgcccgcgcctcttccgatcgtcttcagcgttttaaaaatagcaggggttaatatgtagcggcccatcacggcaatatgagagggcgccttttcaacagccggtttctcaatcagatcctcaacctggtatacatgaccgctctgccgccccgtctgtataataccatatttgctgacatcagcaggatcgacgggctgtacgccgatcgtttctgtgccgtgttggttatagacgtctatgagctgtgaaagagcgggagtgtcagataccataatatcatcacctaagagaacggcaaaaggctcatctccgataaaatgctccgcacacagcaccgcatgtcctaatccgagcggttctttctgacggatgtaatgaatattggccaaatcggcgatctgctgcatctccttcagcgtctccgtcttgcctttttcccgcagattgaattccaattccgccgaccggtcaaaatgatcttcaatcgagcgtttgtttctccctgtaataatcagtatatcttcaattcctgacgctgcggcctcttcgacaatatattggatggccggtttgtcgacaatcggcagcatttctttcggctgcgcctttgtcgccggcagaaatctcgttcctaaacctgctgcgggaatgaccgcttttctcactttttttctcattcatcttcactcctgatcctgtatgtttttcagcgaatctccaaatacccagattcggtttccgataaaattcatcatcattccgccgatagtggcggcgaacttactcaccaatagcgaacagccgcctttttgaaacgcgtaaagcagcaaaaaggtgattcccgacgcggcaagattaatcatgagaaatcgcatgatctctttcccgtcagccttgcgttttacacgaaacgtccacttccggttccatacatagctgttgatgatccctgccgaataggagcagatctgcgccggaagataggggacatgacaagcggcgagaagaaagaagacaccaaaatcaatcagcgtatttccgacgcctacagtgcaaaaacggcctgctgtctttactttttctttcagcataacggcatccggctttgacctcccttcataagtaagatgcggatcgctgtcctatttgttgatatggattactttaacggacagtgttgaataaacaattactaaaatatgaacaaaacatgaaaacgtaatgaggctttgcaaaactcattaagttaacagtttgatagtttaggttgacatattccgtgaggggcactaatattctgtataagtgttaacctttaattattttggttaacattaattttcaaagtaagagaaaggaggggaatatatgcgggaagaaacctattacagcgtcagaatgagagcttcccgaaacgccccccatgagcagggcggaaaacacatttccggcggagaacggctcatcacttacggcggtttacaggaagcggtagatggcttattacataaaggcttctcgcactcaagagggatacctgattttatgcaaattcagcttgaaagcgttaatgaaccgatcgaaacgatccgccctttgccggttgctttccatcaaacagacacgccggaaaaaggacaagcgatcgcccgcaagcttctgcaaaaggcgggaattcccccgcacatgatagagaaagcgtacgaaaacattgcggaatatgcagacgcaagaggagcggtcctgtttgatatccgggcaggaaaacgcattgacggcagaggaaatagaggtgtgcgggtatcccgagtggattggccgtcacatgattttcaaaaatgggcttttacgcacaacatgccggaacattcacgaataaaagaagcacatgccatcgcggcaaaagtttgcgcacatccggggattattgctgaattgtgctggtcggatgaccctgattacataacaggctacgttgccgcaaagaagctgggatatcaacggatttccaagatgaagaatgccggagatgaaagcggatgccggattttctttacagatggctccatagatacggagagctgtatccattttttagagaagcagcctgtattcattcagcgggaggggaacatatgaaacaatcaatgatcgaaaaaagcaaacagcatctttggctgcctttcacacaaatgaaagattacgatgaagatccgttaatcattgaaagcggaaacgggatcatgctgaaagacatcagcggcaaagaatattatgacggcttttcttcagtatggctcaatgtacacggccaccgcaaaaaagaaatggatgaagcgattcaaaaacagcttgaaaaaatcgctcattcgaccttgctgggtatgacgaacgttcccgcaacagaacttgccgagatgctgacaggcatcacaccggaaaagctgacacgcgttttttactccgacagcggagcggaagcaatggaaatcgctctgaaaatggcctttcaatactggaaaaacatagggagacccgagaaacagacgtttatttctatgcagaacggctatcacggcgatacgatcggagccgtcagcgtcggctccattgaactcttccaccatgtgtacggcccgctgatgtttgaaagctacaaagccccgattccgtatgtatacagatctgaaagcggcgaccccgtacagtgccgggatgaatgccttcacgcgctcgaacagctgcttgcaaagcatcacgaagagattgccgcacttacgattgaatcgatggtgcaaggcgcatccggcatgatcgtcatgcctgaaggctttctggcaggcgtacgaaagctgtgtacggcatatgatgtgttaatgatcgttgacgaagtggcgacggggttcggccgcaccggaaaaatgtttgcctgtgagcatgaaaatgtccagccggacttgatggcggcagggaaaggcattacgggaggctatttgccgatcgctgtgacgtttgccacagaagccatttatgaagccttctacgatgactacgacaaaatgaaaacatttttccacggccattcctatacaggaaatcagcttggctgtgccgcggcaattgaaaatctgcgtttattcgaatcagagcgcatcgttgatcaagtcgccgaaaaatcaaaaacggcagcggaatttcttcatgatttgaagcagcttcctcatgtcggcgatgtccgccagctcggtttcatgtgcggcatagagcttgtgcgggataaagagacgaaacagccttatccgcctgaaaagcggatgggatacaaggtgtccttgaaaatgagagagcttggtatgctgacacggccgctcggagacgtcatcgcctttctgccgccgcttgccagcacaaccgatcagttacaagccatgatctccattatgaaagaagcgatagccgaggtgaccggccgtggattttgacggatggctcctcggaaggctcgatgcggtgaaaagagacgggctgtatcggacgctgcgaacacaggaaaccgctctcaaaaccaaggggcaaaagcggcagacctgggcgtccaatgactatttaggcctgtcaaaagatgagcggctgatcacagccgcgcaaacggcgctgagccggttcggagcgggaagcggcggctcacggttaacgacaggaaatactgtgtggcacgaaaaactggaacacacaatcgcggactttaaacagacggaagcggctttattgttttcaagcggttacttggcaaatatcggcgtgcttgcctcactgcctcaaaaaggcgatgtcattttaagcgatcaactgaaccatgcgagcattgttgacggctgccgtttatcaaaagcggaaaccatcgtgtaccgccatattgatatggctgatcttgagaaaaaacttgcctccgtccaggctcggaaccgccgctttatcgtcacagacggcgtcttcagcatggacggcaccattgcgcctcttgaccgcataatggcgcttgcaaagcagtaccaggcatttgtgatagcagatgacgcgcatgcaaccggtgtactgggggaaaacggcgggggaaccagtgactatttcggtgtttgtcctgatgttgtcatcggcacattaagcaaagctgtaggaacggaaggcggttttgccgcgggatcaaacattttcattgattttttgctgaatcaggcgcggacgtttatttttcagacggccctcccgccgtcaatttgtgcggcttcgcatacggcatttgacatcatatcagatatgcacgatacgcgccgtgagctgcagtcgtctgtcaaaacgataaaaacgcgtctggccgatatgggctttaccgtaagaggcggagatacaccgattatccccgttatcatcggtgatgcaaaaacagcggtttcagccgctgcgctgctggagaaaaagggaatctgcgccccggccatccgcccgcccgccgttccggaaggcgaaagcagaatcaggctgaccgttacggcggatcgcagcttacaggacatagacgagctgacagaagcatttgattccattagaaaagagctgaatataaacaaatgagaagtttttttgtcacaggaacagataccggcgtcggaaaaaccatcgtttcttgcggacttgccgcggcattccggcagaaacaggcggatatcggagtgtttaagccgtttttaagcggcgtgccgcggactcatccggaaagtgacacctcgctgttgaaagacatgtcacaaaccgcactgtctcatgaagaaatcacgccatttgaatggaaagagccgcttgccccgtacacggccgccatgcttgaggggaaatccgtgagcatggcggatgtcatggcccactggagtatgattaaaaatcgtcatgagtgtttcatcgtcgagggggcaggcggcatttccgtcccgcttggtgaaaattacttagtcagtgatctgataaaagccatggaattgccggcagtgattgtcaccaggcctgatctcggaaccatcaaccacacatatttaaccgttgaatatgcgaaaaacatggggatagaggttctcggcattattatcaacggcgtaaagagccggccggggctggacgaaaagacaaacccgagcatgattgaaacattatgcaaagttccgattttgggaatcacaccgaagctggatcacgtttcaccggaaaacattcaacacatgattgagaaacatatagatgtttcctctttcatgaatctgacacaaatggggagataaacatgaatcaatggatggatcttgcagagagagtgctggacggggcggaagtaacgaatcaagaagggctggccattttaaattgtcctgatgaggatcttttattgctgatgcatgccgcttttcatatcagaaaacgattttacggaaaaaaagtaaagctgaatatgattatgaatgcaaaatcaggcctgtgtccggaaaattgcgggtactgttcacaatcttcaatatcaaaagcgccgattgagtcttaccggatggtggataagcatatattgctaaagggggcaaaacgcgcccacgacctgaatatagggacatactgtatcgtcgccagcgggcggggaccgtcaaacagagaagtggatcaagttgttgatgctgtcaaagaaattaaagaaacgtacggtttaaaaatctgcgcatgcctcggtctgctgaagccggaacaggcagagcggctgaaacaggcaggagtagaccggtacaatcataacatcaatacatcacaaaggaatcacccaaacattacgacctcccacacgtatgacgacagggtcaatacagtggaaacggcgaaacaatcggggatgtcaccttgttctggtgtcatcgtcggcatgaaagagacgaaacaggacgtcattgatatggcgaacagcttaaaagcgcttgacgccgacagcatcccggttaattttctgcatgcgattgacggaactccgttagaaggggtaagcgaattacatccggtgtattgcctgaaagtgctcgccttgttccgttttatcaatccgtcaaaagaaatccgtatctcaggaggccgggaagtcaaccttcgttcgctgcagccgctgggactttacgccgcaaattcgattttcgtcggagattacttaacgacagcagggcagcaagaaacagaggatcatcaaatgctccatgatttaggttttgaagtcgaatccgttgaagaaatgaaagccggcctgcaatccgcctgcaatacggaggtataagatgacggcggacctatcgattgcacatccgtctctccatgcggattcggatttttggaatgacccttacccgttttatgacaaactgcgatccattgatcctgtttataaaggaaccgtattaaaatatccgggctggtatgtcaccgggtacaaagaagcggcagcgattctgaaagacattcggtttaaaaaccgcattcctcttccggaagcttcaacgaaatatcaaaatctatcgcatatccagcacgatatgctgttatttaaaaatcaatcagaccataagcggatgcggatgcttatcggtaaagaatttaccgcaaagacggcggaatctcttcgcccttgtataaaagaaacggttcatgacttgttggatcaagtccaaatcaaaaaaaccgcggaccttgtttcagagtttgcctttccattggcaagccttatcattgcggagatactcggagtgccgaaagaggagagatatcaattcagacaatggacggcagacgtcatccaggccattgatcttacccgatcaagaaagacgttagtcagagcaagcgacaccgcaggcaggctgacgtcatatttcaaagatttgattcacaagcggaaagcgcaccctcagcaagacttgatcagcaggtttattatggaggaacagctttcaaaagaggaagtgctcgcgacatgtatcttacttgtcatagccggacacgagacgacggtaaacctcatgagcaacggtgtgtttactttattgaaacaccctgaacagcttagcgcactgagagaaaacccctcgcttattgaaactgcagttgaggaatgtttgcgctacgacagccccgcgcagctgacggcacgcaccgcttcagaagactgtgaaataaatgggaaggccataaaaaaaggagagcaggtatatatccttttaggtgcagccaatcgcgatccaagcatattcgatcaacctcacaaaatggatatccaaagaaaaccgaacccgcatcttgcattcggaaagaacgcccatttttgcataggctcctcattagcgcgcatcgaagcacaaattgcaattctcacactgtttgagcggatacctaagcttcggctggctgcacaccgccttgaataccgcaagctcattggttttaggtcgctcaaagagctcccggttgtcattggctgaatgaccatgcaggagggccggattttatcggttcctcttgcaggaaataaatgaaagaaaaaagaatacatatttataaagcaaaaatcctctctgatccatctcactatccctaaaaaaactcactgctcagccaatcaatctaatacagcaagggcctccttttctttcgccaaaacggaacattcaccatgatgcacattttttcagcctcagaaactgtgcaaaaccggcatgttttttgctttattttctcgattctttgtaagcgcttactaatattgagcagaaaagagggggatttgtggacattgttattattttattggcattaggcatgctgatgtttgcggcttaccggggcttttcagtcattttattcgccccgatttgcgcgctgtttgccgtgctcctgacagatccaagcttcgtacttcctttcttctcgaatatatttatggagaagatggtaggatttattaagctgtattttcccgtatttcttttaggggccgtttttggcaaggttgttgaaatatccgggctcgccgagtcgattgcaaaaacaatcgtcaagcttgtgggagcaaaaagagccattctcgccatcgtcttaatgggtgcgattttaacgtacagcggcgtcagtctcttcgtagcggtgtttgccatttatccgtttgctaaaaacctatttattaaagctgatattcccaagcgtctgatacccggtacgattgcattgggcgcctttacatttacaatggatgcgcttcccggcacaccgcaaattcaaaatgtcattccgaccgctttttttaaaacaaacatttatgccgctccctggctcggactgattggtgcagcatttgtgcttacggccggaatgatttatttagaatcccggcgcaaaaaagcggccaatgccggagaaggctatgctggatttcaatctgaagtttccgctgcagaggaatcctcaggtctggctaatgaaacacatacgcctgttttaccgcaggaggcagaacccagccccgcgcggcaagtgctcgcctttgttccgcttatccttgtgggagtcatgaacaaatgcttcacgatgtggctcccgcattggtaccctgacggatttgattttgcgcccctcggtttagaagcgttcgggaagattgacctttcctccgtcactgcgatctggtcagtagaactcgcactgttcatcggaatcatgaccacgattttgttcgattggaaaaaagtcctcttcaatttgaaagaaggactgaatgagggcatcgggggcgccttgctggcgtcgatgaatacaggagccgaatacggatttggcggcatcattgcggcgcttcccggctttaaaatggtcagcagcggcatatcgcagacgtttacagatccgctcgtcaacggagcggtgacgaccactgcgcttgccgggattacaggatcggcatcaggaggaatgggcatcgctttaagcacgatgtcagcagcgtatacagaagcaatcaatacattccacatcccgccggaagtcatgcaccgggtgatctcgatggcctccggcgggatggacactcttcctcataatggcgccgtcattacgctgctcgcggtcaccgggttgacccaccgccaatcctacagggatatctttgccattaccgtcattaaaacagccgctgtgtttgtcattatcgccatttacagtctgacgggccttgtgtagccaaaacagaaaggggaaacgaatatgggaaaaggaaaagtgatggactcttataaagatgctgctgcactgataaaggacggagacaccctcatcgcaggaggcttcggcctgtgcggcattccggaacaattaattctcgcgatcagggacagcggcgtgaaaaacttgaccgttgtcagtaataactgcggtgttgatgattgggggttaggcctcttgcttgcaaaccggcagatcaaaaaaatggtcgcatcctatgtcggagaaaataaaacctttgaacggcagtttttaagcggggagctggaagtcgaattggtgccccaaggaacgctcgcagaaagaattcgcgcgggaggggcgggcattccggcgttttatacacctgcgggcgtcggaacatcagtagccgagggaaaagaacataagacatttgacggacgcacctatcttctggagaaagggattacagggaacgccgccatcgtaaaggcctggaaagccgatcctctgggcaacctgatgttcagaaagacggcgagaaatttcaatccgctcgctgcaatggcaggcaaagtgacgattgcagaggctgaagaaatcgtcgatgccggagagcttgatcccgatcaaattcatacgccgggtatttttgtgcagcacgttctgcttggcgggattcatgaaaaacggattgaacgctgcaccgtccggcaagcatgataaaggaggctgacagaatgagagatagcagaaaacgaatgatcaaacgggctgtaaaggaaattaaggacggtatgaatgtgaacttggggatagggatgccgacgcttgtagccaatgagataccgaatgattataacgtcctgcttcagtctgaaaacggcttgctcggaatcgggccttatccggcggaaggaacggaggaccccgatctgatcaatgcgggaaaagaaaccattaccgaggtaaagggagcctcgtattttgacagtgccgaatccttcgccatgattcgcggcggccacattgatgtagcgatcctcggcgggatggaagtgtccgaacggggagatttggcgaactggatgatccccggaaaaatgatcaaaggaatgggcggcgccatggacctggtgcacggagcaaaacggattattgtcattatggagcatgttaataaatatggggaatctaaagtgagaacggaatgtacgctgcctttaaccggcaggcaggtggtcgatcggctgatcacagatttggctgtattcgattttcatgatggccgtatgacgctcaccgaactgcaggaaggtgtaacaatggaggaggtctttgagaaaacagaaggtcattttactgtcagccagtcgttaaaaaacggggtcagaccaaaatgaggaggtgccgccatgcattcattgcttattgaaaaaacagccgttgtaacaggagcagccggaggaatcgggcttgaaattgcaagagaattcgcccgtgaaggagcagccgtcatcatctctgatgtaaacgaacaagcggggaaagaagcggcggcaagactgaaagatgaaggctgtgaagcagtcagcatcacatgcgatgtaacaaatgaaaagcaagtggccgacatgctgcagacggtcgagaaacaattcggacgtctcgatatccttgtgaataatgcgggcattcagcatgtcgcgcccatcgaggaatttcccaccgaacagtttgaacggctcattcgtgtcatgctgactgcgccatttatcgcaatgaagcatgcattccccattatgaaaaaacatcaattcggacgaatcattaatatggcgtctgtcaacgggctgatcggttttcacgggaaagcggcatataacagcgccaagcacggcgtcatcggtttaacgaaagtcggcgcacttgaaggcgcggctgacggcattaccgtcaatgcgctttgtccgggatatgtggacactcagcttgtccgcaatcagttaaaggacatttccgcaacaaggaatgtaccgtacgagcgggtgcttgaggacgtcatctttccgctcgttccccaaaaacggctgctgtcagtgaaggaaatcgctgattacgccgtatttttggccagcgacaaagcaaaaggggtcacaggtcaggccgtagtcatggacggcgggtataccgctcaatagttcttgtactatttaaaaaacagccgctctgaacggctgtttttttatgcctgaaaaccttgttcactcaataggccgatttactgcgtcaatcggtatccgggctgggtcatttacttgttctgcggcgtattttgtccttgcagattttcctcaccagatccatctcttgcgccgcatttataatcaaacgccctcagtttacaatccttcacagatatacaaatgaatttttacaataaacagaaaatatgtaatttctgacacaataatgccaatagccctaaaacatatgaaacatgaagagctcgtcctaagtgaagaagaggcggtaacaggctccactccggcttttcatcatctctctttaagactgattttcggtgaaacccccatgttttattttatgaataaatatatctaattcgtttgtaaaatcgaacaataactcctccgaaagtattctatacacatttgttataatcatgctaggatgttagataaagggataatttgtaggatattgtatttctgttcaatatgatcggaggaatctcatgaacaatcttgcctttttatttcctggacaagggtctcagtttgtaggaatgggcaaacaattttggaatgattttgtgctcgcaaagagattgtttgaagaagcgagcgatgcgatctccttggatgtaaaaaaactgtgttttaacggagatatgaatgaattgacaaagacaatgaacgcgcagcccgctattttaacggtcagtgttattgcttttcaagtgtatatgcaggaaataggggtgaagccccgcttcctggcaggtcatagcttaggcgaatattcagcgcttgtctgtgccggcaccctttcttttcaggatgccgttacacttgtaaggcagcggggaattcttatgcaaaatgcggatcccaagcagcaggggacgatggccgccgtgactcacctctctctccaaacgttgcaggaaatatgttcgaaagtatcgacggaagactttccggcaggagtagcctgcatgaattcagaacagcagcatgtaatttccggacaccggcaagctgtggaacgtgtcatcaagatggcggaggaaaagggtgcggcatacacttatttgaatgtcagtgcgccttttcacagttcgatgatacgatcagcctccgaacaattccagactgtattacaccggtattccttccgggatgccgcatggccgatcatttcaaatgtcaccgcgcgcccttacagcagcggaaaatcgatcagcgaacacctcaagcagcacatgacgatgccggtaagatggacagaatcgatgcattacttgcttttacacggagtcacagaagtcatcgaaatgggtccgaacaatgttttagccggtctgctgagaaaaacaacgaatcacattgtaccttatcccttaggacagacatctgatgttcacttgctttccaattcagcggaaagaaagaaacatattgtccgtttacgcaaaaaacaactgaataaattgatgattcaatccgtcattgcgcgaaattacaacaaggattcagcggcttattccaatatgacgacgccattatttacgcaaatccaagagctgaaagagagaatggaaagacatgaaaatgagctctcagaacaagagctcgaacattcgatccatttatgcaaattaatttgcgaggctaaacagcttccggattgggaagaattgcggattttaaaataaaacgcccaggaggggacctatgtataccagtcaattccaaaccttagtagatgtcattcgggaaagaagcaatatctctgatcgcgggatccgttttatcgaatccgataaaaacgagacggttgtctcttatcgccaattgtttgaagaggcgcaagggtatcttggctatttacagcatctcggcattaagccgaagcaggaaattgtatttcaaatccaagaaaacaaatcatttgtcgttgctttttgggcttgtatattaggaggaatgatcccggtgccggtcagtatcggagaagatgatgaccataagctgaaggtctggcgcatttggaatatattaaatcatccgtttctgattgcctctgaaaaagtattggacaaaataaagaaatacgctgcagaacacgatttacaggatttccatcatcaattaaacgaaaaatctaacgtcattcaagatcaaacctacgattaccccgcttcattttatgaacctgatgcggatgaactcgcctttatccaattttcttcaggatcgacaggagatccaaaaggagtcatgttaacgcatcacaacttaatacataacacgtgtgccattgggactgccctacacgttcattcgaaagactctttcttatcatggatgcccttaacgcatgatatggggctcatcgcctgccaccttgttcccttcataaccggaatcaatcaaaatctgatgcctacagagttatttattcgcagacctattctttggatgaaaaaagctcatgaacataaagccagtattctatcctctcctaatttcggatacaactacttccttaaatttctgaaaaacgaaccagactgggatttatcccacatcaaggtcatcgcaaacggtgcagaaccgatattgccggagctctgtgacgaatttttgaaaagatgcgcagcattcaatctgaaaagatccgccattttgaatgtttacggtttagcggaagcgtcggtcggcgcagcattctctaaattaggtgaagaattcgttcccgtttatttgcatcgtgactatttaaatcttggtgaaagagctgtaaaagtcagcaaagaagaccaaaattgcgcttcattcgtcgaggtgggacaacctattgactattgtcagcttcggatctccgatgaaacaaatgaaagagtagaagacggaatcatcggccatatccagatcaaaggagacaatgtaacgcaagggtattataacaacccagagagtacggaaaaagcgctgacttctgacggctgggtaaaaacgggagacctcggattcattagtgaaagtggtaacttagtcgtaaccggaagagaaaaggacattattttcgtgaacggaaaaaatatctacccgcacgatattgaacgggtcgcgattgaaatggaagaggttgacttaggaagggttgccgcctgcggtgtatatgatcaaaagacgcaaagcggagaaattgtgctctttgttgtttacaaaaaatcacctgaaaaattcgcaccgcttgtcaaagagataaaaaagcatttgtacaagcggggcggctggagcataaaagaagtccttccgatccgaaaactccctaaaacaaccagcggaaaggttaaacgctacgaacttgccagacagtatgaggcagggaatttttcaacagagtctgccgccatcaatgaatgtttggagagcagtccggaaacatccggacagacacccattcatgagatagaaacggaattgctgtctatcttttccgatgtgctcaacgggaaaaaggttcacctcgctgacagttattttgatatgggagcaaattcattacagttatcgcagattgccgagcgcatagaacagaaattcggacgcgagcttgccgtttcagatctctttacgtatccttctatcactgatttagcggcatatctgtctgaaagccgggctgaaatcaagcaggacgcggcagcgaaaccaagccatgtgacaccgaaagatatcgccattatcgggatgtcgctcaatgtcccgggagcgtcaacgaaaagtgatttttggaatctgcttgaaaaaggtgagcacagcattcgagaataccccgaatcccggctgaaagatgcggcggattatttaaaatccatccaaagcgagttcaatgagagtcagtttgtgaagggcggctatttagatgaaatcgaccgctttgattattcgttcttcggtttagcccctaaagcggctcagtttatggaccctaaccaaagactgtttttgcagtctgcatggcatgcgattgaagatgcgggctatgccggcggcagcatgaacgggagccgtgtcggggtatatgcggggtactcgaaggtgggctacgattatgaacgtctcctttctgcgaattatccggaggaacttcatcaatatatcgtgggcaatctcccttccgtgctagccagccgaatcgcttatttcttaaatttaaaagggccggcggtcacagtggatacggcatgctcctcatcgcttgccgccgttcatatggcatgcaaatctttaatatccggcgattgtgaaatggcccttgccggaggtatccgaacatcgctcttgccgatctgtatcggacttgatatggaatcttcggacgggtacacgaaaacgttcagcaaagattcagacggcacgggcacaggtgaaggcgcggccgcagtcctgctgaaacctctgcaggatgctgttcgcgacggagaccatatttacggcgtaatcaagggaagcgcgctgaatcaagacggaacaaccgccgggattacagcaccgaatccggcagctcagactgaggtcattgagacggcctggaaagacgcgggcattgcccctgaaacactgtctttcatcgaagcgcatggcaccggaacgaagctcggcgatccggttgaatttaacgggctttgtaaagcgtttgaaaagtatacggcaaaaaaacaattttgtgcgattggttctgttaaatcaaacatcggtcatttgtttgaagcggcaggcatcgtcgggctgatcaaatctgtcctcatgctgaatcacaagaaaaatccgccgttagcgcactttaatgaacctaatccgctcattcattttcactcttcaccattttacgtaaaccaggaagctgcagcgttcacatccggtgatgagccgctgcgaggcggagtcagctcatttggttttagcggaacgaacgctcatgtggtattggaagaatatatttctcaaagtgagtatgcacccgaggatgaacatgggccgcacctgtttgttttatccgctcatactgaaaaatcactctatgaactcgcacagcagtaccggcaatatgtatcgggtgacagccaagcttcattaaagtccatttgctatacagccagtacgggcagggctcatttggatcatggcattgccatgattgtatccggtaagcaagaattatcggataagctgacccgcctgattcagggagacagaaaccttcccggtgtatacatcggttacaagaatatgaaggaaatgctgcctgctcataaagaagagctgaatcaacaagcagccgctctgattaagcagcgtttacgtacgcaagatgaacggatcacatggctgcatcgcgcagccgaattatttgtgcaaggagccgttatcgattggcgcgcgctttattccggtgaaactgtacaaaagacgccattgcccctgtatccgtttgaacggatccgatgctgggctgaagctgaccaattgcgcttaaacgagggcgaaaagaaaggaggagcagcattgaatatcaatcaatcgaaagcgcacattgaatccttcctgaaaactgtaatcagcaacgcttcagggatcagagcggaggaactcgatctgaatgctcattttatcgggctcggaatggattctatcatgctgtcacaggtcaaaaaagccattgcggacgaatttggggtagacatcccgatggatcgtttttttgatacgatgaacaaccttcaaagtgtcatagattacttggctgagaccgttccatcgtcctttgcatccgctccgcctcaagagaatgttccggcgcaggaaatacaggtcatttcagaagcacagcctgaatcggatcgcagagaaggtcatcaagagcatatgctcgaaaaaataatcgcttctcagaatcaattaattcaggataccttgcaagctcaattaaatagctttaatttgttgagaaatagcggacatcattccgatgagaaagaatatgctaaagcgcgagagaaatcaattccttctgtcaagcaggggcctccgaccgtcactgcagaacagaaagcggctcaagaagcgaaaccctatgttcctttccagcctcagaacctgaatgatcagggacactataccgcacggcaaaaacaatacttagaagacttcatcaagaaatacgcagataaaacgaaaggttccaaacaatatacggacaacacccgatttgctcatgcaaacaaccgcaatttgtccagcttccgttcgtattggaaggaaatcgtatacccgattatcgccgaacgttctgatggttctaaaatgtgggatattgacggaaatgaatatatcgatatcacaatgggattcggggttaaccttttcgggcatcatccttcctttattacacaggttatcgatgattcaacccgttcatcattgcctccgctcggcccgatgtcagatgtcgccggtgaagttgccgaccggatccgcacatgtaccggagtggaaagggtcgctttctataattccggaacagaggccgtcatggttgccctgcgtttggcgcgggcggcaacaggaagaaagaaagttgtggcgttctcgggatcttatcacggcacgtttgacggcgtattaggggtagccggcacaaaaggcggggctgcgtctgcgaatccgctggctccgggcataccgcagagctttatggatgatttgattattttacattacaacaatcccgattcgctggacgtgatccgcagtcttggtgatgaattggcagccgtactggtggagccggtacaaagccgcagaccggatttgcagccgcaggcatttttgaaagaattgcgggcgatcacgcagcaatccggaacagctctgattatggatgaaattattaccggatttcggatcggtctcggcggcgcacaggaatggttcggcattcaggctgatttagtgacctacggaaaaatcatcggcggcggacagccgttaggggtagttgccggaaaagctgagttcatgaatgcgatcgacgggggtacctggcagtatggggacgattcctacccgcaagacgaggcgaaacgcacgtttgtggccggcaccttcaatactcacccgcttaccattaggatgtcattagccgtccttcgccatttacaaaccgaaggagaacatctgtatgagcagcttaatcaaaaaacagcctacctggtcgatgagctgaatcgctgcttcgaacaagcgcaagtgcctatccgcatggttcgattcggttctttattccggtttgtctcatcgcttgataatgacttgttcttttaccatctcaactataaaggggtctatgtatgggagggacgcaactgcttcttgtcttcggcgcataccgcggatgatatcgaaaatattattcaagcggtgaaagacacggtggaggatcttcgccgaggcggatttattccggaaggcccggattcccctgatggcggaggccgtaaaaagtccgggacgcgcgagctttcacctgaacaaaagcagttggttatggcatcccattacgggaatgaagcttccgccgctttaaaccagtccattatgctgaaagtgaagggcgaactgcagcatacaccattaaaacaagccgtccggcatatcgttgaccgtcatgaagctttacgtacggtgattcatcccgatgacgaggtacagcaagtgcaggaacggatgaatatagatatacctgtcattgattttaccggtctcccgcatgaacatcgggagccggaaatccaaaaatggctgacagaagatgccaagcggccgtttcatttccatgaacaaaagcctttgtttaggatccatgtgcttacatcggctcacaatgaacatctgattgtgctcacgttccatcacatcattgccgatggatggtcaatcgccgtttttgttcaagaactggagagcaactacgcggcaatcgtacaaggaaaaccgatttcaccgaaagaggcagatgtttcgtttcgccaatacttagactggcagcaggcacagattgacagcggccagtatgaagaaggggtccgttattggcggcgtcatttctctgaaccgatacagcagccaattctgccgagcacagcttctgtccgttatccgaacgggtatgagggagaccggtgtaccgtcaggcttggacggccattgagcgaggctttaaggtcattaagcattcagatgaaaaatagcgtatttgtgacgatgctgggtgcatttcatctttttctgcaccggcttaccaaacagtcaggccttgtgatcggggtccccgcagcaggtcaatcgcatatgaaacagcatgatctgattggaaattgcgtcaatatgattccggtgaagaacacgtcttcttcagaaagcactttatccggttatcttggcagtatgaaagaaagcgtgaatcttgcaatgcggcaccaagccgtcccgatgacactggtggccagagagcttccgcacgatcaagtgccggatatgcgtattatctttaatttagacaggccttttcgaaagctgcatttcggaaaggcggaggcggagcccgttgcatacccggtaaaatgcaccctgtacgatttatttcttaacataactgacgcgcatcaagaatatgttcttgatttcgactttaatacgaacgtcatcagtccggaaatcatgaaaaagtggggagcgggttttacaaaattgctgcaaaaaatggttgagggagattcaatccctcttaacgccatgataatgttttccgatgaagaacagcatgctttacaagcactttacgccgaacaccagaagcggatctcttcaataggaagcaatacggcaaattttactgaagcctacgaggcgccggtaaatgaaacggagcggcagctggcgcggatttgggaggaacttttcggccttgaacgggttggcagatcagatcgctttctggctttgggaggaaactcactccaggcgacgcttatgctttccaaagttcagaagacatttcaacaaaaggtttccatcggacaatttttcaatcaccagactgttaaggaattagcacatttcattcagaacgaaacgaaagtcgtacacctcccaatgaaggctgccgagaaaaaagcgtattacccgacatcgccggcacagcaaagagtatatttcctgcaccaactggaaccggatcagctggcgcaaaatatgttcggccacatatcaataacagggaagtacgatgagcaagccctgatctcatctcttcaacaagtgatgcatcggcacgaagcgtttcgcacgtatttcgacattatagatggcgatatcgttcagaaacttgaaaacgaagttgattttaacgttcatgtccggacaatgagccgggacgaatttgatgcctattcagaccggtttgtaaaaccgttccgcctggatcaagctccgttagttcgtgcggagctgatcaagattgaaaacgagcaggccgaactgcttatcgatatgcatcatatcatttcggacggttattccgtcaacatccttacaaatgaattgctggctttatatcatcagaaaccattaccggacattgaatttgaatataaagatttcgcagaatggcaaaaccaacggctgaatgacgatgccatgaagcggcaggagacatattggctggaacaatttcaagacgaaattcctatccttgaccttccgacagacggttccaaagcggcagaacggtcttctgagggacagcgtgtgacatgctccttacagccggatgtcatccgttcgcttcaagacttggcgcaaaaggcggaaacgactctctatacagtgcttctggccgcctataatgtgctgcttcataaatatacgggacaagaagacattgtcgtaggcacgcctgcttcaggaagaaatcatccggatatcgaaaaaatcatcggtattttcatacaaaccatcggaatccggacgaagccgcacgccaatagaacgtttacggattatctggaagaagtaaagcggcagacgcttgacgctttcgaaaaccaagactatccattcgaccggcttgtggagaaattaaatgtgcagcgggaaacaaccggaaagtctctgtttaacacgatgtttgtgtttcaaaacattgaatttcatgaaatccggcacaatgaatgtacatttaaagtgaaagaacgaaatccaggggtctctttatatgatttgatgctcacgatcgaagatgccggtcaacagatagagatgcattttgattataaaccgggacgattcacaaaagacaccattgaacagatcaccagacactataccgccattttaaaccgccttgttgagcagccggagatgacattgtcttccgttcctatgctgtctgaaaccgaacggcatcaactgctgacggagtgtaatggcacaaagacgccgtatccgcataaggaaacggtatatcggtggtttgaaatgcaggcggaacagagtcccgatcatgaagccgttatttttggcaatgagcggtatacgtacagacagctcaatgaacgggcgaaccgattggcgcggacgttacggacaaaaggcgtacaagcggatcaattcgttgccatcatctgcccgcatcggatcgagctgattgtcggaattttggctgttctgaaagccggcggcgcatacgtgcccattgatcctgaatatccggaagatcggatccaatatatgctgagagattcaagagcggaggttgtgttgacacagcgcagcctgctggatcaattaccgtatgatggtgacgttgtgcttttggatgaggaaaactcataccatgaggagcactcgaatcttgaatcggacagcgatgtgcatgatttggcctatatgatctatacgtcaggttcgacgggaaacccaaaaggtgtactcattgagcatcagggactggctgattatatttggtgggcgaaagaggtttatgtaagaggtgagaaaaccaacttcccattatactcttccatctctttcgatctgactgtgacctcgatatttacaccgctggttacgggaaataccatcattgtctttgacggcgaagataaaagcgctgtgctttctgagattatgcgggactcaagaatagacatgatcaaattgaccccggcacatctgcacgtcatcaaggagatgaatatcgctggcggcaccgcaatacggaaaatgattgtcggcggagaaaatttaagcacccgtctggtcaaaagtgtcagcgagcagtttaaaggccggctggacattttcaatgaatacggaccgacggaagctgtcgtcggatgtatgatttatcacttcgacgcagaacgggacaagcgggaatttgtaccgatcggcactccggctgccaacacggatatttatgtggccgatgcaagcagaaacctggttcccatcggggtaatcggcgaaatatatatcagcggaccgggtgttgccagagggtattggaaccgcccggatttaacggcagagaaatttgttgaaaacccgtatgtcccgggagcaaagatgtacaaatcaggggatttggctaagcggttgaaggacggaaatcttgtatatatcgggcgcgttgatgaacaagtcaaaatcaggggataccgaatcgagcttggtgaaattgaagcagcgatgcataacgcggaagcggtgcaaaaagccgcggttacagtgaaagaagaaaaagacggcttaaaacaattatgcgcgtattacgtaagcgacaagcctatagcggctgcgcagcttagggaacaattgtcatcgaagcttccggactacatggttccgtcctattttgtccatctggagcatatgccgttaacgtccaacgggaaaataaaccgtaaggcactgcctgcaccggaatcgagtctgcagcagacagctgaatatgttccgccgggtaatgagacggagtccaaactgacagatttatggaaggaagtgctcggaataagccatgcggggatcaaacataatttctttgatctcggaggcaactccatccgagcggctgccctagccgccagaattcacaaagagctggatgtgaatctgtctctcaaagacatattcaagtttcctaccattgaacaattggctgacaaggcgttacacatggacaaaaatcgatatgtaccgattccggctgcaaaggaaatgccatattatccggtttcttcagctcagaggcggatgtatttattaagtcacacagaaggcggcgagctgacttacaatatgacgggtgccatgaatgtggaagggacgatcgatcccgaacggttaaacgccgctttccgaaaattaatcgcgcgtcatgaagcgttgcggaccagctttgatttatatgaaggcgagccggcacagcgtattcatcagtacgtcgactttacgatagaacggattcaagcaagcgaagaagaagcggaagaccgtgtgcttgatttcatcaaagcgtttgacttagccaaaccgccgctgatgcgggccggactgattgaaattgaacctgcgcggcacgtgcttgtggttgatatgcatcatatcatttctgacggcgtgtccgtcaatattctgatgaaagatttaagccgaatctacgaggggaacgaaccgggcccgctctctattcaatataaagactttgcagtttggcagcaatcggaccttcagaaacggaacatcaagagccaggaagcgtattggctggatcagtttcacggtgatattcctgtactggatatgcctgcggattatgagcgacctgccatacgcgattacgaaggcgaatcatttgaatttcttatacccgaacacttgaaacagcgtttaagccaaatggaagaagacacaggagcaacactgtatatgattttattggcagcctatacgattcttttatccaaatacagcggacaagaagatattatcgtaggaacgccatctgccgggcggactcatttggatgtagagccagtcgtgggaatgttcgtcaatacgttagtcattcgcaatcacccggcgggccgtaaaacatttgatgcctacttaaacgaagtaaaagaaaacatgctgaacgcctataaaaatcaagactatccgttggaagaattaattcagcatctgcatcttccaaaagattcaagccgcaatcctttattcgatacgatgtttgtgctgcaaaatctcgatcatgctgaattgactttcgattcccttcaactcaagccgtatccatttcatcatccggttgccaaattcgatttgaccttgtcgattcaggcggaccgcgacaactatcacggactgtttgaatattcgaaaaaactgtttaagaaaagcagaatcgaggttttatcaaacgactacttacacatcctatcggcgattttggaacagccaagcattctaatcgaacatatcggattgagcggcagcaatgaggaagaagagaacgcgcttgattctattcaattgaacttttagggaaaagcattatttctttaaaatatataaaatgaggtgctccaatgtcggtatttaaaactcaagaaacgtactgggaaaacctgtttgatgaagaagacggcctaagcgcattcccttactttaaagcagcggataaagcgtcgttggcccgtaccggctaccaggaaaaatgcatctgccgttccttatctccggaagtatctcaaagaatcatgacaatggcgaatcattccgatatggcggcctatctgattttattggcgggtattgaatgcttgttgtataaatatacggatcgaacgagcctgattcttggcattccaacggtatcgaagcaaaaagccggccagtcagccgttaacaacattgtcctcttaaaaaatacgctttcaaacgagagcacatttaaaaccgtattcgggcagctgaaagaagccgttaatgattctctgaaaaatcaaaacctgccgtttagaaaaatggcccggcatctgagcgtgcaatacaatgacgagcatatgcctttgattcataccgtcgtttcgcttaacgaaattcattccttgcaatgtaaagaagatactgcaaccgatacgctgtttcactttaatttggagaacaacgggattcatttgaagcttttttataacggcaatctgtacgatgagcgctatatcaatcaaattgtatcccatttggatcagctgctgtctatgatcctgtttcagcctcaagccgcgatccatacggcagagatcttaccggaagcggaaaaacagaagctattgtttgattttaacgacaccgtcagagatttctccgggagcagaacagtctatcaattatttgaagagcaggcagaaagaacgcctgagcatgcggccgtcaagtttaaaaacgaccatttgacgtacagggaactgaatgagaaggcgagccgtttggcaagaacattgcgtaattgcggggttcaacccgatacgttagtcgccattctcgctgatcgttcattagagatgatcgtatccattatagctgtttggaaggcagggggcgcttatgtgcccctggatcctgaatatccaaaagagcggcttcaatatttgcttcatgatgcggatgcagacgttctccttgttcagcatcatttaaaaaacagcctcgcctttgacggcccggtgattgatttgaatgatgaaacatcataccatgccgattgctcattgttatcaccagtagcggaacacagccatttagcctatgtcatttatacgtcgggtacaacaggaaagccgaaaggggtcatggttgaacacggcggcattgtgaactcgcttcagtggaagaagtcgtttttcaagcattctccggcggatcgcgtgcttgtcttgtacccgtatgtttttgatgcgttcattttaaatttctttggcccgcttatctcgggggcaactttgcaccttttgcctaataaagagaataaagaaactttcgccattcaaaatgccataaaacaagaaagaattacccatttctcaacttccccccgtcttctgaaaacgatgatcgaacagatgaacagagaggacttcatccatgttcagcatgttgttgtaggcggtgagcagctggaaacagatacagttgagaagctgcattctctgcagcctcgcattcggatcaataatgaatacggaccgacagaaaacagcgtggtatctacatttcaccctgttcagtccgctgatgaacagatcacaatcggcagcccggtggccaaccatcaagcttatattttaggagcgcaccatcaaatccagccgatcggcgtaccgggagagctgtatgtcggaggagcgggagtggcccgcggctacctcaatcggcctgaattgacggaggaaaaatttgtggagcatctgcatgtccctggtcaaaagatgtataagacaggggatctcgccagatggctgccggatggaagaatcgaatatttagggcggattgatcatcaagtgaaaattcgcggctaccggattgagatcggcgaggtagaggcagccatgttcaatctggaaaacgttcgtgaagccgcagtcgtcgcgcgggaagacgcagacggggccaaacaattgtatgcctattatgtcggcgagccttctttgaccgctgcgcagttcagagaagaattatcccgggaactgcctaattatatgattccctcccgctttatcccattggaacgcattccgctcacttccaatgggaagattgatctgaaagctttgcctgctgctgacgaaaatacgcgggcggaaaacgaatacatagccccgcggaacacaatagaagaactgctggcgtctatctggcaagaagtattaggggcagaacgtataggaattttggataatttctttgattttggcggagattcgattaaatcaattcaggtgtcatccagattgtatcaagccggatacaaggttgatatgaagcatttgtttaaacacccctcgattgctgaactcagtcagtttgtagcaccggtcagcagggtggctgatcaaggagaagtgaatggcggaaccaagctgaccccgatacagcattggttttttgagcaaaaaatgccgcatgcacaccattacaatcaggccgtcatgttatattcggcggaaggctttaaagtggctccgcttcgccggacgatggaacggatcgcgtcacatcacgatgccttgaggatgatttttgaaaaaacgccggatggatacgctccgcgaattacaggaacagatgaaagtgaactataccatctggaagtgatgaattataaaggggaaaccgatccagctcaagcgattgccgataaagcgaatgagattcaaagcagcatggtattagacaaagggccattgatgaagctcggtttgttccaatgtccggacggagatcatttgctgattgcaattcatcatttgctgattgacggagtatcctggcgtattttactcgaagattttgcaagcggatatgagcaggcagaacgcggacaaacgatccagctcccgcaaaaaacagactcgtttccatcctgggccgatcaattgtccaaatatgcggcggaaaccgatatggaagaggagattgcgtattggaccgagctttcaagtataaagcctcagccattgcctaaggacactatcagcgaagggtcgttattaagagacagcgaagaagtgacgattcaatggacaaaagaggaaacggagcaattattaaaacaagcgaaccgcgcctacaacacggatatcaacgatctgctgctgacttcgttagggctggctgttcacaagtggacaggcacggaagacattgtcgtgaatttggaaggccacgggagagaaccgattattccggatgctgacatttcccgcacgataggatggttcacaagccagtaccctgtcgtcctgaggatggaagccggaaaaaacctgtcgcagcggatcaagatcgtaaaagaagggctgcgccgtatccctgacaaaggaatgaattacagcatcatcaaatatatatccgggcactcggaagccgacagcctgcagctgaatccggagatatcgtttaattatttggggcaatttgaccaagacctgaagcatcaggctttgcgcatctcgcctttttccacagggttatcaatgaacgaaaaccaagagagaacggccgtgcttgatttgaacggcatgattgccgaagggacattatcactgacactgagctacagcagcaaacaatacgaaagatctactatggctcaatttgcccgggggttgaaagaaagtctgcaagaagtcattgcacattgcgtaagccggcagcagacttctctcacaccaagtgacatcctgttaaaagacatctcaatcgacgaactggaacagcttttggagcagacgcgtgaattaggcgaagcggaaaatatttatccattaacgccgatgcagaaaggcatgctgtttcacagcttatttgatccgaattcaggtgcttattttcagcaaacgatgtttgatctgcatggagatctggaaattgattcattttcaaaaagcttggacggcttatcgcaaaaatatgatattttccgcacgaatttttacagaggctggaaggatcagccgctccaaatcatattcaaaacgaaaaaaatcggttttcaattcaatgacttacgagagatgaaggaatcacaaaaagaagcgatgattcagcagtatgccagagaagataagatgcgggggttcgacttagaaaaaggcgcgttaatgcggttatttatccttcgtacggatgaaaagacataccgttttatctggagtttccaccatattttgatggacggctggtgtctgccgctgattacaaaagaaattttcgagaattactttgctttgcttcagcaaaagcagcctgaacaatcgtcaattactccgtacagtcaatatattgaatggctcggccggcaagatgcgaaagaggccgcggcttattgggataagtacttggaaggatatgaggagcaaaccggccttcctaaggatcaccatgcaacggaagacggacgatacgttcctgaaaaagtgacgtgtgacataagctccgatctcacttcgaaaatgaagcggacggccggcaagcatcatgtcacgctgaacacgctgctgcagacggcatgggcggttttgctgcagaaatataaccgcagccgggacgttgtgtttggaagtgttgtatccggaagacctgctggaattccaaacgtggaaaccatgatcggcttattcattaacaccattcccgtccggttccgatgtgaagccgggacaacgtttgccgggcttatgaaagaggcgcaggaaagggctgtagcgtctcaacaatttgagacgcacccgctgtacgatattcaagcgcgtacaacgcaaaagcaagatttaattacacatttaatgatattcgaaaattatccggttgatcagtatatggaaagtataggccgccaaaacggaacatccatcacgatttccaacgtacaaatggaagaacagaccaactacgattttaatttgactgttattcccggcgacgagatgaacatctcttttgaatacaacgcaaatgtgtatgagcgggcaagcatagagcgggttcgggaacatttcatgcatatcctgcatcaagtcgtgacagatgcggatattcgggtggatcaagttgaattgttaacggaaggcgaaagaagaacccttctgcagacgcttaacgacacggccgcgccgtttccgcagacgccggttcatcaattatttgaagagcaatcgcagcgtacgcctgatcaagcagccgtcattgataaggacaggcagctcacgtacggagagctcaataagcgggccaaccgactggcgcgaacgttaagagcgaaaggagtgcaggcggatcagcctgtagccatcatcacaagaaacagcatcgaatcggtggtcggaatccttgccgttttaaaatcaggcggagcctatgtccctatagatccggaatatccgcaagaccgcatccggtatatgctggatgactcccaagccggaatcgttttaatgcagcgggacgtcaggaaacagcttgcctatgaaggcgccacggttttacttgatgatgaaagttcttatcaccaagatggctctgaccttgctccgataaatgatgtgagccatttggcatatgtcatttatacgtcaggttccacagggcggccaaaaggcgtactaatcgagcacggaggcttgaccaattatatttggtgggcgaaagaagtttatgtaaaaggcgagaaagccaacttcccattgtattcgtcaatttcttttgatctgacggtgacttctattttcacgccacttgtcacaggcaatgcaatcatcgtctatgacggagaggataaaacagctctgcttgaatcgattgtgcgggacccgagggtggatatcattaaattgaccccggcccatttgcaggttttgaaagaaatgaacattgccgatcaaacggctgtccgaagaatgattgtgggcggggaaaacttaagcacccggttagcccgcagcattcatgaacagttcgaaggccggattgaaatatgcaatgagtacggaccgacggaaaccgttgtcggctgcatgatttaccgttatgatcccgcaaaggacagacgggaatcggtaccgatcggaaccgctgcggcaaacacgagcatttacgttcttgatgagaatatgaaacccgcaccgatcggagtgccgggagagatctatatcagcggcgccggtgtggcaagaggatatttgaaccgtcccgaattaacggcggagaaatttgtcgatgacccgtttgaacccggagcgaagatgtataagaccggagatttggcgaagtggctggcggacggaaacattgaatatgcgggcagaatagatgaacaagtgaaaatcagaggctatcgtatcgaattaggcgagatcgaggcggcactgcttcaagaagaagcgatcaaggaagctgtcgttacagccagagaggatgtccacgggtttaaacaattgtgtgcatattacgtgagcggcgggcaaacaacggcagcccggctccggaaacaattgtctcaaacccttgcaagttatatggttccggcttattttattgagcttgatgaaatgcctttaacttctaacggaaaaataaacagaaaagggctgccggctccggatttcgagctgcaggacagagcagagtataaagctccccgaacaaaagctgaagaaatattagtttctgcctgggaatcggtattaggcgctgaaaacgtcagtattcttgataatttctttgaccttggcggagattccattaaatccattcaagtatcctccagattaaatcagcaaggatacaaaatggaaatcaaagacttgtttcaatatgcaacaattgctgaattgagtccgcatatcaagcagaatctgcgtatagccgatcaaggtgaggtcaaaggaaaagtcagcctgactcctattcagcattggttttttgaacaaataacaacagatcagcattattacaatcaagccgtcatgctgcatgcgccggaaggttttcaggaaacgcagcttcatcaaaccctgcaaaagcttgctgaacatcacgatgcgctccgcatgacattccggactacggaaaatggctgtgaggcacagaatgaagaaatcgcccaaagcggactgtaccgcttagaagtcctgaatctgaaagaagatcccgatccgggacgtacaattgaagccaaagctgatgagatacaaagcagtatgcatttaagtgatgggccgttaatgaaagctggtttgtttcaatgcgcaaatggagatcatctgctcattgccatccatcatttgattatagacgggatttcatggcgcattttactggaagatatcgttagcggctacaaacaagccgagaacgggcgagtgattcaactgccgcaaaaaacagactctttccaattatgggctaagagactctcagaatatgcgcaaagtgaaagcataaaacaagaacaggaatattggacaaaaatcgaacaaaccgaagtcaaaccgctgcctaaagattttcatgaaacccatacaactgcaaaagacagcaaaacagcaactgtggaatggacgaaagaggaaacggagcttttattaaaacaagcgaatcgcgcttatcacacggaaataaacgatttgcttttaacttctctgggtctttccatatcgcattggtcaggactggaacaaattccgattcatttagagggacacggccgagaacagattatacaggatatagatatctcccgcacggtcgggtggtttacaagtctgtatccggttgtgctgcacgcgcagccgggcaaagaaatctctgattatatcaagacgaccaaagaaggattgcgccaaattccgtataaagggatcggatatggaatagcaaggtacttaagcggcggaatgccatcgaaactcaatcctgagatcagctttaactacctgggacagtttgaccaagatttacagcagcatggggttcagttatcttcttattcttgcggttcagactcaagcggacatcaagaaagaccgtatgtattgaatataaacggaatgatcaccgagggccggctgaagcttacgatcagctacagcagcaaacagtacgcaaaagaaacgatcatgcggttatcggaaacgattcaaagccgcctgcggaccatcattacgcattgcgttcataaagaacaatcggaactgacgccaagcgatattttgttaaaaggcatgtccattggcgaattggatcagctcctcattcaactgccgcatgcaggtgaggttgaaaacgtgtatccgctcactccgatgcagaaaggaatgctctttcacagcctgctggacgaggcctcaagttcttattttgaacaagcatcgttcgatttgcagggagagttaaagattgattggtttaaagcaagccttgaacgattatttgaaacatacgccgtgctcagaacccgtttttacagcggctggaacgatactcctttacaaattgtctataaaacgcaaacaccgcaaattcattttgcagatttgcgtgatagagaggagcacctgagagaggatgcaatcgcagcctatcaaagagaagacaaggcaaaaggatttgacttggctcgggatccgctgatgcgcatagcgattttccgtatggaagaccgcaaatatcatttgatttggagcttccatcatattgtgatggatggctggtgcctgtctcttatcacgaaggaagtgtttgatcattatagcgccttacaggaaggaagggaaccagaaccgccatcggcagctccttacagcgactatatcgagtggcttgaccgccaagatcagggagcggcaaagcggtactggagcgggtatcttgaaggatataaaggtgaaaccacgcttcttcataaaatagcgcagcatgaacaaaaagaatacgcctatgccaatgtgatctgccgatttgatcacgaacagacaaaacaattacagcagatcgcaaatcagcatcaggttacgttaaatacgttgatccaaacgttatggggagtattattacagaaatacagcggatccgcagacgttgtcttcggcagtgtcgtgtcgggaaggccggcggaaattcctgatgtggaacagatgatcggcctgttcatcaatacgattccggtccgcatccgctgcgatgaggacagcacttttgctgatacgatgcaaatggttcaacaaaacgcgctggcttcccaatcgtacgatacctatcctttatacgaaatacaggcccaaacggaacaaaagcaaaacttaattgatcatatcatgatctttgaaaattatccgatagggcagcaagttgaagagacgggacattatggtacggagctgaacattacgaattttcatatgcaggaacactcccactatgatttgaatgtggttgtcatacctggcaaacagctggccgttcatttcggttttaatgaaaacgaatatgaaaaatcagaagtggagcggctccgaggtcattttgaaaaactcatgcagcaagtattgcggcagccgtctgtcaaaatagaagatttggagcttctctctcagcaagaaaaagaatatctgctcagccgctttcagtctaatgacatgcattacccgcgtgaaaaaacgattcatgagttgttcgaggaacaggcgcatcgtactccggacaatacagcggttgtattcgagggtaaacaattcacctacgaagaactgaaccggcgtgccaatcagcttgctcaaaccttgcaggcaaaaggagtgcaggcggatcagcttgtcggcattatgactgaacgctcgcttgagatggttgtaggcatcttgggagttttaaaagcgggcggtgcatatttgccgatagatcctgattctccgtctgaacgcatccgttatattttaaatgattcaagcatcagcgtattgctttactgcgggaagctgcaggatgacatcggcttctcaggaacatgtatcgatctcatggaggaacatttctatcacgaaaaagacagcagtcttgcattctcttatcagtccagtcaactggcctatgccatttatacttccggcacgacaggcaagcctaaaggcacgttaattgaacatcgccaggtcatccacctgatagaagggctgagccgccaagtatactctgcctatgatgcggagctgaatatagccatgctcgctccatattatttcgatgcttctgttcagcaaatgtatgcttccttgctgtcaggccataccttgtttattgttccgaaagagatagtgtcagacggtgctgccttatgccgttactatcggcagcattcgattgacatcactgacggaacacctgcccacttaaagcttttgatagctgcaggtgatttgcagggagtcacgcttcagcatcttttaatcggaggagaggctctttccaaaacgacggtaaataagctcaagcaattattcggcgagcatggcgctgcgcctgggattactaatgtatatgggcctacggagacttgcgtagacgcgtctctgttcaacattgaatgttcttccgatgcttgggcacgcagccaaaactatgtccctataggcaagccgttaggcagaaaccgaatgtacattcttgattcaaaaaaacggctgcagccgaagggcgtccaaggcgagctgtatattgcaggggacggtgtcgggcggggttacttgaacctgccggaactgacggacgaaaaatttgttgccgatccgtttgtaccggaggaccgaatgtacagaaccggtgatctggcccgccttctgccggatggaaatattgaatatatcggccggattgatcatcaggtgaaaattcaaggttttcggattgaactcggtgaaatcgaatcggtgatgctgaacgttcctgatattcaagaagccgccgcagctgcccttaaagatgcagatgatgaatattacttgtgcggatactttgcagcagataagacaatacagatcagtgaacttcgcgaaagaatggcccggcatttacccggatatatgatcccggctcattttgtgcagctggataagatgccgctgacgccaaacgggaagttgaatcgccagttattgccggctccggtcaaaaagcgtgacagcggcatagagtacgtcccgccgcaaacttcggcagaaatccagctgacagcaatttgggaggatgtccttggactagagcaggtggggatcagagatcacttttttgagatcggcggacactccctgcgggcaacggcgctgattgcaaaaatacaaaagcaaatgcatgtccaaattcctttgcgggacgtcttccgtttcccaaccattgaacagctcgcacggacgatcacgaagacggagctgaccgggtatgccgcgattcctgcaattgaaaaaagaccttattatccggtatcctcagcacaaaaacggttgtacatcctgaatcacttggaaggcggagaactcagttacaacatgctgggactgatgactgtggaaggaaagcttgatcgtgacaagctgcagcaagccttccgcacgctgattttgcgccatgaatctttgcgcaccggttttaaaatggctgacggagaacctgttcagtatgtcttggatcacgcggcgtttgaagcagagtggtaccaaggggaagaagttgatgcggacctttatatccgccaatttattcgtccttttcacctggatgagccgccgctgcttcgcgtagggctgattgaacttcaatctgaccgcggaattctgatgtttgatatgcaccacattatttctgacggaacatccatgagcgtattgatcaaagaatttatccggatttatgaaggagagacattaccgcccctgcgcatccagtacaaggactacgcggtatggcagaccggcgaagcgagattacagcagattcaaaaacaagaagcctattggttagagctgtacagcggcgacgttcctgtccttcatctgccggccgattatatccggccgtcggcacgggattttgcgggagccacaatgcattttacgcttgataagcaaaaaagcgacggattaaagcagctggcatcccaaactgaatcgactttatatatggtgctccttgcgtcttatacattattgctttcaaaatacagcggccaggaagacattattgtcggcagtcctatagcgggaagaccgcacgccgatttggaaccgattatcggaatgtttgtcaatacattggcgatgagaaattaccctgaaaaagggaagacgttctctcagtatctgtccgaagtgaaggagaatgcattaaaagcttatgaacatcaggattatccgttcgaagcgctgatcgatcaactgaatatcgccagagacttgagccgcaatccattgtttgacaccatgtttgtgcttcaaaacacggagcaggaacagttagagataaatgacgtcactttcaaaccatatccaaacggacatacgatggcgaaatttgatctaactttaactgctgtggaagaaggggcgggtattcagttcacgatggaatacttgacggctctgtttaaaccggaaacgatcgaacggatgatggggcattttgaacagctggttgattcgattattaaacagcctgaggccgagctggctcgtttaaatatgatgaccaaggaagaggaaagagacattcagcaactctttaacgatactgcagttgcggaaaaacgaattccgacaacgattcatcagctttttgagcagcaggctgagcgtaacccggatcatgaagccgtcatgtttggaaatcagacgctgacttatcgtcagctgaatgaacgttccaatcagctggcgcgcgttcttcaagataagggtgcctgcactgatcaggttgttgccgttctcacggatcgctcagcacatatgatcatcggcattttagccatattaaaggccggcgcagcatttctccctatcgatccggagcttcccgaaaaacggcgggcttttatgctaaaagacagcggtgccgatgtgcttttgacttgtgcaggtcacgctattccgccgctctttgaaggagaagtgcttctgcttgatgatccgttactatatcaaggcagaacagacaatcttaacctttcctgctcggaaaatgatttaatgtatgttatttacacgtcaggcacaacagggcagccgaaaggcgttcagctggagcacaagacgatgacgaatctgctcgcttatgagcaggatcatacgcagcttcgctttgacagagtgctgcaatttgccgcaatgagctttgatgtctgctatcaagaaatgttctccgcgctttcaagcggaggaacactttttatcatcggcaatgaggcaaaacgtgacatacggcagctcaatgattttgtcagaacgcacgggatacaaacagcatttctcccgacagcgttccttaagctccttgcctcagagaaacactatttcgaaccgtttgccgagtgcgtggatcacatcatcgctgcgggagaacagctcatcgcaacaaggatgctgcgtgacatgctggcacgacaccaagtcacattgcataatcattacggtccgtcggagacgcatgttgtgaccatgtataccgtcgatcctgatacagatcaggagcttcagccgatcggaaaaccgatttcaaatacggagattttcattttgaatgaagccggaacgcttcagcctgtcggaatcgtcggtgaactttgtatttcaggagtgagcttggccagaggctatcataacagggagtctctgacgctcgaaacttttgttccgcacccatatgactcgaatcaacggatgtataaaacaggcgatctggctcgttaccttcccgagggaaacattgaatatgcgggaaggagggaccatcaagtcaaaatccgcggttatcgggttgaactcggtgaggtggaagccgctcttctcaagcacgtacaggaagcagttgtcctagcaaaagaaaataccgatggccaaagcgatttgtatgcctattttacagcagagcaatcactctcgatcagtcagctgaaagaaaaacttgctggccaaataccgggatatatgatcccttcatacttcatccagctggagaaactgccgctaaccggcaatggaaaagtaaatcgaagagcattaccgatgcctgaagcaggtttgcaaacggggagtgactacgttgctccgcggacgaatatggaagagcagctgatatgcatctggcaagacgttttgaaggtaaaagaaataggtgtaaaagataactttttcgatttgggcggccactcgttgcgagggatgacgctcatcgccaaaattcataagcaattcagcaaaaacatttcattaagagaagtctttcaatgtccgacagttgaagaaatggcacaggctattgcagaagctgaaaccaacggaccggactatattccgaaagccaaagcaaaagatgtctatcccgtatcgtccgtgcagaagatggtttacctgtcaacacaaatagaaggcggagaactgagctacaatatgccgggaattcttacattagaaggaaaactcgacatgaatcgcttgcaaaccgctttccaaagactgatccagcgccatgaatcgctgcgtaccggttttgaaatggtccgcggagaaccggtgcaggtgatcaaatcgcaagtggagttttcgatggaaagatacaaagcaacagccgacgaggttgaggaatgtttccgggccttcgtgcggccgttcgatctcagccaagctccattactcagggccggactcatcgagttagaacaagacctgcatattttcatgtttgatatgcaccacattatcacggacggcgcctccatgaatatttttgtcgaagaactgattcaattgtatgacggcaaagagttagctccgctccgtattcagtacaaagactttacggaatggaaacatcaaaaagaacaaagagaacgaatcaagagccaggaagagtattggcttggtgtatttcatgaagagctcccgtcattcgagctgccgaaagattttgcgagaccgccggttagaagctttgatgggaaaaggcacaattttacgctcgataagactgtcacccaagggataaagcagctggaagaattgaccggaacgaccgcttacatgattctattctcggcctattccatactgctggcaaaatacagcggtcaggatgatatcgttgtcggtacacctattgcagggagaccgcatgcggatttggaacccattatcggaatgtttgtcaatacattagccatccgcaccgctccaatggcggaaaagacatttttggattatataacggaaacgaaagaaaccatgctgaaggcttttgaacatcaagagtatccttttgaagaattagttgaaaaactgggtgtgaaacgggacttaagccgcaatccattgtttgatacgatgtttgtcctgcaaaataccgaacaaacagatattgaagtggactctctcgcagtcaggccttatgaacaaacagagacggcagccaagtttgatttacagctgaacttcttaatagatcaagatgagattcagggcagttttgattactgtacgaaactgtttaaaaagaaaaccattgctgtattggccaaggattacgtcatgatcctttcggcgattatgagaaacccatccattcctttaaaagacattcaattaagcgaaaaagtaaacaaaagtaaacatctcgcaagcacaatcgaattggatttctaatcacagggacagcggctgtcccggcatgaatgccgcggctgccgccagtcgcctgaaaacaggaatgaaaccaactggagggatatgagtgtcagaattcaaacaacaggagttgttctggggccgaatgtttcacacggaagaccgtcctagtgcattcccttcgtttcaaatgtccgactcaacagtaaagcgtgatataacaagtggatctgactgtattcacagttcattgagtgcggatgtatcacggcgcatcctgaccatgacgaaccaaacgccaatggccgtctatctggttctcctgatcggaattgaatcccttttatacaaatacacgggggaagaaggcgtgattacaggggttccaacctttgaagacgaaactgatgaagatcttcgttcagaccagctcatgttaatcaaacagcatatcaattccggcagtacgtttaaatcaattttccatgaattgaaacatacgctggacgaagcgatcttatatcaggacgttccctttgataaaatggccggacagctgaggctgaactacaatgcaaatcatttgccaatcatcgatacagtcgtttcactagagcaaattcatcctgatggtttcatagaaacggctgctgcagatgctttattccagtttgctatgggtgaagacttgattgacataaagttatgttttaatgaacaagtctatgaccgtcagtatatgatgcaggtgctcggacatttaaaccggctattttctgtcatattatttcagcctgagctccccctcggtcaagtgaatattttgccagaatcggagacacattcacttctcgttgacaatcaaactgcgaaaactgaatatccgcgggataagacggtttatcagttattcgaagaacagatgaaacgaacaccggatcaagcagccgttatttacggagaaaagcaattcacatatcgtcagctcaatgaacgtgccaatcaattagcccgaacgttaaggaaaaagggggtaaagacggatcggctcactgcgattatctgcgaacatgagatcgaactggtcgtgggaatactggccgttttaaaagcgggaggggcctatgtgccaattgatccggattatccgaagcatcgcatacagtatatagcagaagactcccaagctgatatcgtcctgacgcagagccatcttcaaaaacagttggaacttgcgggcacaatggttttcctcgatcaggaaagctcttaccacgaagacggctctgacctggaaccgatcagcagtacgaaggatttggcctatgtcatttatacgtcaggctccacaggcaagcctaaaggagtggcaattgagcatcagggcttaaccaattatatttggtgggcccgccgggtctatgtcaaaggggaaaaaaccaactttcccctatattcgtccatcgcttttgatctgacgataacgtctgtttttactccgctcattacaggaaatgccattattgtctacggaggagaaaacagtgctgccttgcttgattccattattcaggattcaagggcggatattatcaagctgaccccggcgcacttgcagttattgaaagagataaatatccctgctgagtgcaccattcggaaattcattgtcggcggtgacaatttaagcacgcggctcgcccgaagcatcagcgggaaattcggcggaaaaatcgaaatttttaacgaatacgggcctacagagacagtcgtcggctgtatgatttattcctttgatccgcaatacgacagacgggaatcagtgccgataggaaccgccgcggacaacatgaacattttcgtgctggataagaacatgaagccggtgccggccggcgtcccgggagaaatatatatcagcggggacggcatcgccagaggatacttgaacagagcggaattaacggcggaaagatttttgcagcacccctttgtaccagaggtgaaaatgtaccggacgggagacttagcaagacggctgccggacggaaatatcgaatatttaggccggatcgaccaccaggtgaaaatccgcggttaccgcattgaaatcggggaagtcgaatccgcatttttccaaataccgccgattcaagaagctctcgttacggcacaagaaaccaacggggaaacatccttgtgcgcctattataccgcacagcattctttaaccgcaggcgaaattcgggagcacctgtcccggcagcttccgtcctatatgatccctgcttattttgtacagctggcagcgatgccgcttacttccaacggaaaaatagatcgtcaggcgctgcctgctccaacgggaaatctcaccggcaatccttatacagctccgcggacagaactggaaaaaatactggccggggtgtgggaatcggtattaggcgcagaacaggtcggaatcgatgaccatttctttgagctgggaggagattcgattaagtcgattcaggtaacctcaagcttatatcaagccgggtataagcttgacatcaaacacttgttcaaacacccgacgatctccgggcttgctccttttattaagcccgttacccgaatcgcagaacaaggggaaatcaaaggccgtaccttattgacgccgattcagcattggtttttcgcccggcaataccctgatccgcaccattataatcaatctgtcatgctttattttaaagaggggttggacgaatcgaagcttcagaaagtcatgaagaagattgccgagcatcacgatgctttgcgcatggtctatgttcagggagatcatgaatacgaagccagaacccgcgggatcagtgaaggagaattattcagcctcgacgtattctctttactcgaagaaaacaaccctgccgaaacgatagaaatgatagccaatgacattcagcaatccatccatttagccgatggtccgctcatgaaactgggattgtttcaatgtcgggatggcgatcatttgctgattgcgattcatcatctggttgtagatggcgtatcgtggaggattttacttgaggatataacgtcagcttatgagcagctccaaaacggagaagcgatcacgctccctaagaagacggattcctatctgttatgggctgaacgattgaaacgttatgcagaaagcccggaatttgaagcgaaaaatcaatattggcttgagcagaaacatatctcgcaacacaaattgccagaggataatgagcaggagaccggtctggccgaagaccgggaaacgatcatcgtccaatggacagaggaagaaaccgagcgtttattaaaaaaatcgaaccgtgcctatacgactgacattaatgatttattgctgaccggactcggaatggctgttcatcgctggacggggcatgaagaaattcatgttcatctggaaggacacggcagggaatctgtttttcaagacgttgatatttcacgtacggtgggctggttcacaacccaatacccggtttctcttcaaatccaggcggaccgggacatctcccagcggattaggacggtgaaagaacagctgcgtcagattccccaaaaaggaataggatatggcctgatgaaatatttgtccgatcatccgaaggcatcagaatggaccggacatccggaaatcagcttcaattacctcggacaatttgatcaagatttcgaaaatggaggaatcgaggtatctccttactccggagggaaaattgcgagcgacaggcaccccattgcctatacgcttgacattaacggcatgatctcagacggtcggctgtcattggccatcagttacagcggtaaacaatatcgaagagaaacaatggaaacatgtgcagctctcttaaagaaaagcctaaaagaagtcatcgaacattgcgcagctcaagaacacattcacctgacgccaagcgatatttcgctgaaggacataacaatcgaggaattagatcaatttgttaagcaaacacagcatatcggcgacattgaaaatatatatcctttaactcccatgcagaaaggtatgctgttccatagtttaatcgattcggcttccagagcttactttgaacaagccgcttttgacctcaaaggcgacttggatattgaggcatttacaatgagtttgtcgcagctggcggaaagacacgagattctccggactcatttttatacggaatggaaagatcagcctttacagatcgtattccgaaaaaaaccgatcgaaataactgttgaagatattcgaagcatgaagaataaacaacgaaacgagttcattgccggctttgtacaaaaagataaggcaagaggattcgaccttacccaagatgcgttaatgcgcgtatcaatccttcgtacagaggacgaccaagtccgattgatatggagcttccatcatattttaatggatggctggtgtctgcctcttattacgaaagaagtgtttgaaacctattatgagcttcttgagagaagaaaaccggagcgggaagccgtcaccccgtacagccgatatatcgaatggctaaaagaccaggatcatcagaacgctttggcctattggcaaaaatatttggacggttatgaaggacaaaccgttttactgaaagaacctgtctcaaaccaagccaagaaatatcaaaaacaaaggcttgcatgccggctcggaaagcagctgtcagaagaaatcagacagactgcaagcaagcatcacgtcaccgtgaatacattcattcaaagtgcgtgggggctattgctgcaaagatacaacaacagtcaggatgtcgttttcgggtcggttgtatccggacgcccggcagaaattccgggtattgaatccatggtcggcttatttatcaacaccattcccgtacgtattaccgctcagcctggaatgactgtggaacaagtgttgaaaatgagccaggagcaggcattggcctctcaggcgtatgatacatttccgttgtatgaaattcaggctcaaaccgaacaaaagcagcagctgatcagtcatatcatggtatttgaaaattatccggtcgagaaacaaatggagcatatgaaaccgaatcgtgacgcgctggacattatcaatttccatatggaagagcatacccattacgatttcaatttcattgtcatgccggctggagaaatcgacattcattttgtatacaatagcaacgtctatgatcatgcaagtgtcaagcggatggaagagcattttatgcaaatcattaagcagatggtgaacagtcaggcgattcgcgtccaagacttggatatacttacgggagatgaacgttcgctccttatagaggcatttaatgatacggaagcagattatccaaaggaaaagacgcttcatcaattgtttgaggaacaagcacagcgtacgcctgatcaaacggctgtcgtatacggggaaagccagctgacataccgggaactgaatgaaagagcgaatcaacttgcccggacattgcaatcagaaggcgtgcagccggatcagccggtcgggattatggccgaacgttccttggaaatgatcgtaggactcttcggaatcttaaaagccggcggcgcgtatgtgccgatcgacccgagctatccggtagaacggattcactatatattggaggattcggatacgaagctgttgttagcacagagtcacttgagaaaaagcgtgccttttacgggaaaaatgcttgacctggaagatccgcgattctcttgggaagatggttcaaacttgaaacagacggccggaccgaatcacttagcttatgttatctatacttcgggatcaacaggccgaccgaaaggggttatggtggaacaccgatccgtaatcaaccgtctcgtttggatgcaggaacattacccgctggataagcaggatgtcattttgcaaaaaaccccaatcacctttgatgtatcggtgtgggaattgttctggtggtcgatgactggttctaaagcggtattgctgtcaaacggaggagaaaagaaccctgacgtcattttagatacgattgcgcagaaaaatgtcaccattatgcattttgtgcctgcgatgctgcatgcttttcttgagtccatggagcagaaatccgacgaggaattaaagagaaagctggcgtcattaaaatatgtatttgcaagcggcgaggctttgacgcctgcgcacgttgccgggtttcatcgcatgatcacaccggcgggcgaggctcaaatcattaatttatacggaccgaccgaagcgacgatcgatgtatcgtattttgaatgtgaagcgggagaaacgcttaactccgttccgataggtaaaccgatttccaacattcaattgtacatcgtacagcccggatcggaatatttccagccgctcggtgtggcaggagagctgtgtatcgccggagacgggctcgctcggggctatttgaaccgtccggagctgacagctgagaagtttgcagctcacccatttgaagcagggaagcggatgtaccggacaggcgacttggcaagatggctgccggacggaaatatcgagtatttgggacgaatcgatcatcaagtgaaaatccgaggctaccggatagaactcggcgagattgaagcatctttattacaactcgatgctgtcaaagaagcggtcgtcatcgcgattgaaaaagagggctcaaagcagctgtgcgcttacttgtcaggagacgagtcattaaatacggcgcagctgaagcgtcatttgctgaacaaactgcctgcgtatatgattccggcttattttgtacaagtagagaagatgccgataactgctaatggaaaaatcgatcgaaaagctttgccggctcctgagggaaataggcttaccggaaccgaatacacagcgccaggaacgttaattgaaaagcagctggccgatatatggaaggatattttagctctgcctgaccccgggattaaagatcacttctttgacgttggcggccattcacttaaagtattgcagctcattcatcaaattaacgccggtatgggactcaacatgcattatcaagccgtatacgattttcctaccatcgaaacaatggcacgcgccattcaagcggcagttttcgaatccgagacggatcataacgtattcgtcaagctgaaccaggaagattcaatccctgtgttctgtttcccgcctttaatcggatatggactcgtttataatgaaatggcgaaaagacttgacggcgtcagcaccgtctatgctgctgatttcttagaagagccgtctcatgagaaagaaatcgttgaccgatatgcagaaagcatgatacgcattcaggaacaagggccttttgttttgcttggttactcttcgggatcgaatttggcttttgaggctactaaagctttggagaagcgaggccgcaccgtatctgatgtgattatgctggattctaaaataaccacttctgtaactcatttatcggaagaggaaatcgaagagatcgtccatctgaatatggacattattccggactattacagagaaatattaaccattccttcgattaaggataaaatcagaggctatcttgcgtaccacaatgaagtgatcaattccggcgccgttaacgccaacatccatcatttgctatgcggcgatgtaaccgatgataggggctggacacaatcaacagcacagcattatcttgagtacaaattaaaaggagatcacgtgacgatctttgaacctcacaacatcgaagaaaatgcggaagccattcgatctattattaaaaagattgaagaacggcatcatcacggacttgttcttgaagaacaactgtcaatgggatcgtttgcgggggacgcaaagtttgacaaaatgtaaatgatcaagtgtaaaacgccgctggcctggcactcagcggcgtttttattaaaaaggcgagagtcatactcctgtgttcgcaaggtttactccagagccgttctccatgaccagttgtcatcaaatggtaaaaaaatcatcatacattttaaggaaaaaggaggatgtcaagttattagaaaaaagtgtagcgtatgtttatgggtactagctctattattgagttgcttaactgcggagtctgctttttactgccggtactgcaatttgttctcagatggtaaaagttgcctaaatttttaaaaaaaggaggagcgttaagttatgtgtaaaaaatgttgggtatgcctatgggtccttgctttattattgagctgtttacctggggaatatgcgaatgcggtaagcattccaattgcaaaacatgttgggaattcaaatccgcttatagaccatcatctgggcgcagatccgtttgcgctgacctataacggaagagtctacatctatatgtcaagcgatgactatgaatataacagcgacggcacgattaaggataattcatttgccaatttgaataaaatatccgtcatatcttcagcggatatggtgaactggacagatcacggagcgattcccgcagcgggtgccaatggggtgaatggcggccgggggattgccaaatgggcaggagcatcatgggccccgtcagccgcggtgaaaaagatcaacggtaaggataaatttttcctttatttcgcaaacggcggcggaggtatcggggttctcaccgcagacagcccgaccggcccatggacagatccgatcggaaaaccgctggtgacgccaagtacaccaggaatgtccggcgttgtatggctttttgatccggcagtattcgtagatgatgacggtaccggttacctatatgccggcggaggcatccctggaggttcaaatccaacgcaggggcaatgggccaatcctaaaacagcaagagtcatgaaattagggcctgatatgaccagtgttgccggaagtgcatctacgatcgatgcacctttcatgtttgaagattcgggaatgcacaaatataacgggacatattactattcctattgcatcaatttcagcggcgcgcacccggccgataaacccccgggtgagatcggctacatgaccagctcaagtcccatgggtccctttacatatagagggcactttctgaaaaatccgggtgcatttttcggaggcggcggaaacaaccatcatgccgttttcaattttaaaaacgagtggtacacggtgtatcatactcaaactgtcagctccgctctgttcggggccggcaaaggataccgttctccccatataaataaggttgtgcataatccagatggctccctgcaagaggtagcggcaaattttgcaggtgtcaaacagctatccaacttgaatccatatcaccgggtagaagcggaaacgtttgcctggaacggacggattttgacagaggcatcctcagcacccggcgggccggtcaataatcaacatgtcacaaacattcataacggagactggattgctgtaggaaatgcagacttcgggtcagacggtgccaggacgtttaaagcaaatgtagcatccgctcttggcggaaaaatagaagtgcgtctcgatagtccaacaggtaagcttgcgggaacactgaatgtcccttccacaggcggaacgcaatcttggagagaaatagaaactgcggtaagcggcgcagccggtgtgcacaacgtattctttgtatttaccggaacaggttcaggaaacttgtttaactttgattattggcagtttacgcaaaaatagcatcagtactgtgatttaaaagcaggacagaacacatttttctaatacggtaaaagacagataaaggagaggaaaaattgatgtcgagcgtaaaaaaaacaatttgtctattattagtatgtttcactacgctgtcagtaatgttaatgggcccaggcgctgctgaggtcttggcggcaagtgatgcaacagttaatatatctgcagaaagacaagtgattcgcggttttggaggaatgaaccacccggcttggattggagacttgactgcggctcaacgggagaccgcttttggcaatggacagaatcagttaggtttttcggtcttaagaattcatgtagatgaaaatagaaataattggtacaaggaagtggagactgcaaagagtgcgatcaaacatggagcaatcgtttttgcttccccttggaatccgccaaacgatatggttgagactttcaatcataatggtgacacaacagctaagcggctgagatacgataagtacgccgcatacgcgcagcatcttaacgatttcgttaatttcatgaagagtaatggtgtgaatctgtatgcgatttctatgcaaaacgagcctgattacgctcacgaatggacatggtggacgccccaagaaatcctgcgtttcatgagagagaatgccggttccattaatgcccgcgtgattgcgccggaatcatttcaatacctgaaaaatatatcggaccccattttgaatgatccgcaggcgcttaggaatatggatatcctcggaacccacctgtacggcactcaggtcagtcagtttccttatcctcttttcaaacaaaaaggaggagggaaagagctatggatgacggaggtatactatccgaatagtgacaacaattcagcggatcgctggcctgaggctttaggtgtttcagagcatattcatcattcaatggtagagggagattttcaagcttatgtgtggtggtacatccgcagatcatacggccctatgaaagaagatgggatgatcagcaaacgcggatacaacatggctcatttctcaaaatttgtgcgcccaggctatgtaaggattgatgcaacgaaaaatcctgaaccgaatgtttacgtgtcagcctataaaggagacaataaagtcgtgattgttgccattaataaaaataacacaggggtcaaccaaaacttcgtgttgcagaatggaactgcttcgcaagtatccagatggatcacgagcagcagcagcaatcttcaacctggaacggatctcaaagtaacggacaatcatttttgggcccatcttccggctcaaagcgtgacaacatttgttgtaaagcgttaaaggcatcagcatcgcaataagccaattttcttactcaataaagaaaattggcttattttctgtgggagagaagtgttgatttttaacgatacacggacattgggtataataatgacaatgacttcaaggagtgatcaatatatgtcacggcttcacagcaaagtattaatcatagacgatgaaaaagaaattttggaactgatcaaaaccgtattaataagagaaggcattgatcgcgtagtgaccgcttcgactgcccgtgacggattggctcaatttcatcaagaaaatcccgatcttgtgatattggatatcatgctgccagacggtgaaggctatgatatctgcaagcaaataagagacatttcacacgttcctattatctttttgtctgcaaagggggaggaaacggataaaattgtaggacttgccatcggcggggacgactacattacaaaacctttcagccctaaagaagtcgcataccgggtcaaagcgcagctgagacgggtctcttacttacagccttctcaaaccggaaccctaataaaaaaagggccatttgaattaaaccaacaacaagccgagctcaccaaaaatggagcggctattgagttaacacctaaagaacttatgcttatgacctattttctgcagcatcccaatcgggtgatcagtaaagaaacactctatcaagctgtatggggagaagatttcttcggttctgacaacacggtgatggttcatatacgcaggctccgtgagaaaatagaaaacaccccgtcaaaaccagactttctcgtcactgtgaaagggttaggctacaaatttgttgtaaaggatgcataaggatgaattggcgattaacaggcagatatatggtctctgtcattatcgtgaccatcattacagtcttcattaatttatttatttttatgttttggctcgttttccaggcgaacagccaacatgacgaagaaagtacaccggaaactttcacaagatcattccgacaatatgtcacgttatcgaacaatggtatcacggtaaacaaagagggccaaaaagctttaaaagagcagaatgcatggattcaaatattagatgaaaacggacaggatgtttatcatgatagagaacctaaaggactgaagaaaaaatatacgcctattgaaattgtaaatttacataaatataaggatgaacaattattatcaaccatttacgccggcggaaaaaaagtaaacggcaaggagtacagttactttatagggtttaaaaatccctctctcggaaaatttgtcctctcatatgataccaaggaatttgtgacgaagttcaatgcaggaaccatcatattattatcaatagatgcattgatcgcgttagtcattggctatctattcagccggcagctcacaaaaccgctcggccgtgtcattcaaggaatccagcggttagctaatggagattatacgatcaacatgaaacctaaaggcatttataaagatgtcttctataatgtcaatcatttatcggaacaactatcttcaagcaaaaaagaaaaagataaattagagcaaatgcgtgaagagtggatcagtcatatttctcatgacattaaaacaccattagcatctattcaaggctatgcagaaatcatcaaagatccaaattaccatctcacagccgaacaggtcagagagtacgcccagatcattgagagtaaatccctctatatgaaagatgtgatggaagatttaaatttaacgacaaggctgaaaaacaacgatgtgatgttacatacagaacgggtaaaccttgtatcgctgctgcgggaaacgttaattgatatgttaaacgattctagatatgcggataagtccattgaacttcaaacgaacgtggaaaagctgatgctgaaccttgatgcgatattgattaggagagcggtcacgaatctcattttaaatgccctcgttcacaatgatcctgatgtgaagatcgttgtacggcttgaacaaaaagaacggactcatgtgaaaattaaggacaacggcaaagggatagaagaagaggagctggaaaaagtgtttgatcgctattacaggggcacaaatacaggaacgacgcatgcaggctctggtcttggaatggccatagcaaaggatattatccaaaagcacggaggggacatcaccattcacagcaccgcgggagaagggacaacgatagatatacaattatcataatggctatacaaaaaaacggttctgttgattaataacagaaccgttttttcctattgttccgaaaacactttgattcctttgacaatgttccaaatgaaaaaatagatcgccacaaggaatgtaacagcatacgtcacaagcaggaaaggcccggcgtgcctgatgtcattcataccaagtaaacctgaagcgatgatgccaataccaaaaatcaaataaggaatcagatgcgtccacaaagattttttcgcatgatatttcacatcatcctggcctaagaaatagacgataatcggaaacagaaacggcgcaaaaaatatactgaagtaacataatgaagacaaaattttattttctctcaaaccttttcacctctatgatttattgaagggggaattcttctggctgaatccctcactgaagtacaatcttattgtacaactccaaccttaacccgtattaatccgaaccttacatcaaccttaaattaacaaggactcgtcttcttacagcaatcataagattcaatgccatactgagactcatcacattcagcgtgtctacgttggaaatacatttaatttttcgattcgattgaaaaatgacgtgtaaagtcccgattcagcccggttttctttgttctatatgtgtcaggtgtgtcttattcaatagagatagagcaaattgacagactttaacacctcccaaaaacaagaaattaggttgatagacaatcatgagaaagatttttacaatgagttcgagctcataagaaagagccaaaatgatgcgaaggaggaaaagatcagatatgaaacggtcaatttctatttttattacgtgtttattgattgcggtattgacaatgggcggcttgctgccttcgccggcatcagcagcagagacaaaaacgccagtagccaagaatggtcagcttagcataaaaggtacacagctcgtaaaccgagacggtaaagcggtacaactgaaagggatcagttcacatggattgcaatggtatggagatttcgtcaataaagacagcttaaaatggctgagagacgattggggcataaccgttttccgcgcggcgatgtatacggcagatggcggttatattgacaacccgtccgtgaaaaataaagtaaaagaagcggttgaagcggcaaaagaacttgggatatatgtcatcattgactggcatattttaaatgacggcaacccaaaccaaaataaagagaaggcaaaagaatttttcaaggaaatgtcaagtctttacggaaacacgccgaacgtcatttatgaaattgcaaacgaaccaaacggtgacgtgaactggaagcgtgatattaaaccgtatgcggaagaagtgatttccgttatccgcaaaaatgatccagacaacattatcattgtcggaaccggtacatggagccaggatgtgaatgatgctgccgatgaccagttaaaagatgcaaacgtcatgtacgcgcttcatttttatgccggcacacacggccaatttttacgggataaagcaaactacgcactcagcaaaggagcgcctattttcgtgacggaatggggaacaagcgatgcgtctggaaatggcggtgtattcctagaccagtcgcgggaatggctgaattatctcgacagcaagaacatcagctgggtgaactggaatctttctgataagcaggaatcatcttcggctttaaagccgggagcatctaaaacaggcggctggccgcttacagatttaactgcttcaggaacattcgtaagagaaaacattcgcggtactaaagatttaacgaaggacggccctgaaacgccagcacaagataaccccacacaggaaaaaggcgtttctgtacaatacaaagcaggggatgggcgtgtgaacagcaatcaaatccgcccgcagcttcacataaaaaataacggcaatgcgacggttgatttaaaagatgtcactgcccgttattggtataacgcgaaaaacaaaggccaaaacgttgactgtgactacgcgcagatgggatgcggcaatctgacccacaagtttgtgacgctgcataaacctaagcaaggtgcagatacctatctggaactggggtttaaaacaggaacgctgtcaccgggagcaagcacagggaatattcagcttcgtcttcacaatgatgactggagcaattatgcacaaagcggcgattattcctttttccaatcaaatacgtttaaaacaacgaaaaaaatcacattatatcatcaaggaaaactgatttggggaacagaacccaattagtaagcttaaggcggacatcagcaacgatgtccgcttttgtcatcttaaacagcaatacaaggaggtttacgtggcggatgaactctgaaacagtatatgggcctgtacaaatgttgttagcaatctcaagaaagccaaggagtagatatgattcactgaacatatgatgtaatcgtttcacagttttgaaaagcgtttatagcgcaatgtatgtatttcacatccgccacattttttacgtaagggggaacaagagaatgaaaaggtatgacgcatttccagagccaattggcggctatactgtcggccgaatccagatggattttgagtacacggcatcagatcatacaaaaagagaactgacggcgtttgtatactatccgtccgacagcagcgaaggtaagactacatcagcctacatgtttcctgaagtctgcgaaatgcttgatgagcagccgcttctcactgcgttgaaggatgcttactctatagatatcaagacccaatgttacgacgaccttgctctctccgggaaggaaaaacgctatccggtgttattctatgtttgcggcgggggcggttctccagaatggggtacagtgatctgtacagacttggcaagcatgggatatgttgtagtaagcatcggccatcaaaatagcacgatgtataagcgtaaagatgggcgcctgtttaatatatcaaaggatttttcggatgtcattatggcgttttctgaagatccggagatgctggctttggctggtaagatggagatgcggcccgacgatgaaactgccattgagatgtgtcaaaacgtgcttacactgccgatacttgacaagttaacagagtatagtgaattacaggcagaagatgtaaggtatgtagccgattatcttgtcaaattggattctggagagctgaattcaatctttaagggcagattgttgcttgacatcggcatgggcatagtcggacattcttatggagggcctacgacggcgattgtttgcggggacgacgaccggttcgcctgcgggattggcttggatagcggagcgttcggccttcagggcagcgacattaagaaaccctttttgctgctgttttctgaaccgaactataacatgaatgcgatcattggcgctaacaatagcatggatacctattatttctctgttgatcgtgctgcgcatttagattactgcgacatcgtgtttaccagtgtgaatgaggaacttagaggcgaacgggatgccatggagatgcgaaatcttgttacagactatacgaagaacttttttgatcattacatactgcagaaggctgcaagtgtggaaagtctggcatacgatggcgtggacttgatcaagaagaccagcaacaagtgacataaccgattaaaatactcaaactgaaaaacctttatgaccaatttaatttattaaggacgtagaggttttttaatattatattaccttataaaaaggggatgctcttagaatatagatccacttttatattctctacataatttctagtttacataatatatattctaggaagttaaacaaagaaatgaattatccgtctcataaattaagtatactttagttattgagacggaagagaaatttataacgaactaaccgtacattgtgttattgcagtcatttcgttacacgtataaaaatgtttgcagcgttaggtttgattcagctttggcctttacccggaatgagatcatttttagggacagaaataaaaaaaccatgtctggtaatactttgccgcatcttccctgcttttttccgacgagttttcgcatcggctccccacatatgagcaagtatgacagtcgccagcccgagcaccccgcgaaataaaatccggctctgaaccccagccaatcattaaaaaatcctgcggccaaaggtcctccgaaaataccgagtgcataaagcgcctggtatgcccccgtcgatgttgttctcatgtctgccggaacagactcaatcgacattccaagcagcaaaggaaaaataatgcccgagtgaaaaaactattaaaacctggaccagataaagcgccatcgggctgacggtaaaaggaatgataaaaataaaaacggctgcgagtcaataaaacagctttaatgttacccagttttcgcatatgcgaactaaagttcctatcactagcagagccagtgcgtgcttagtcataaacgaaaagacaacaagctgatttctttctcgccattgtgaagccaaacattgcggtcgttttcatttcgcgaatcatgaaagacaggcaaagaccgaggccgctcccgatcccaaatgccgcgtgccatccccattccctgacaacataaccgctcatgctcatccctgacagctgagctaacacgtgaataaatgagatccagcgcatggctcctttcgtgtcatccgccgcaaaatagctcgtaaataaaatggtgaatataacccatgtagatgagaaaaagccgcctgatgaacagacggcgctgcagctagttatttgcttcggttacctgcggaagcatgagtgatccgataatgcacagttaaaaatttcagtccgaacagccacatatgatgaacggctttcaggcttgttttgctctgggctgaaataagaaatgtctctgccagcggaagatgacacgtcccccatttcgtctgcagataaatcccttcatcacccgctccgctttttcgccgtctgcttgtcaaaacaagattctgcttacgcgcataaggctttaaaatgcccgtcatttggccgtacggcagcggaagagagatattcatgtatccttccccttttgccctgtacgctgaatacagcgcagtaaaaacggtttcctgcttttcatttgttctgatccacgcacggacattttttctgctgtctttgtcagagtcaactcctataatatcactgtgcataatataccaatccggattcatggacaggtgaatctgccccgctcttctgctgaacggctcgtacacgcgcgcgaacggacgaaaccatccgctccacgtcacttttgccatgatgtcataatcaattgtctcttcataaaaggaattaacggccggcgccagtttttcagttgaaaagtcttcagaatgcagttctctcatctgatccagaaggccggtataatggatgtcatttgctgcatgaatatcagtcaaaaagtctttgcctatcgttctcttcccgtaaatacggctgaacgttctttcgctgccctcatcaaacggtctcggattttccaacctccaccccgccaaagccggaaggataacgccgaatgcattgacggccccgtgaatccaaatcatctggctgatcgtgagcattgcctcctcgcggtagacaccgtacgaatatatcaaagaaaaagcaattgtgatcattaacacagccgaagaactcctgatcaagatcctgcctgttttcgtaacaaacggcaccgtaaagacgagatatgcatttacatacagacccgccagatacagagcgacagcaatcacatcaagtgtttttgaaaatgtaatccccaaggcaataaggatcggcgaaatcaaaataatgaccgtgctccatctgtaaagaacccgtttctcccgtatgatcctgccgagcaatccgttaaagatcggaatgagaaaagcggaatagtgaaagtgcaccgccgtcagcagaacgataagcggaccgaaattcataacgggaatctcaaggacatatgcgaagaaccagaatccgcccccggccaaataaatgaaacccgccataacagacatctcttctgttctgtgaatatttgttttcatcagccgccgggcagcatacagtgccagcccaagcgtataaatgagccacacaacggcaaaaaaactgaagtctgtgacaagcgcaagcaccgcacataaagcggcaacaggataactccgtaataacacattctctaaggtctttgacggccgaaaagcaaaatcgaatacagcgggaacgaaaaaaagtacggaaaataaaacaaacgtctcagcagctgatatatgcggagcttcagccgccgcaaatcccaaaaagcaaatcacgcttaccatgagatgacgcttcagcatgtttccccctctgtttcacggaaagtcccccggtaagagaaaagcgtgccgagtatccggtttttcacatgaacctttatgctgaagcaattcatttcctcatcataagcctcataaacggttgaactgccgcacagccatgccggaagcgggattttctttccgactatcaggagccactgccttccggatgtaataacaagccctccgtctgaagacgcttctaaatgcagttcagacagtaggatgcggggtttgccgaagtaatcaagaattctgttttcccgctcatcatattccatgactgcatcaaaaaaacgcgttttgcttttaaagaaaaaggtacgattccattccacgctattttgcctgtttttgttttcgatagtgaaagggatatcgtttcccctctctgagaaaaaacatctgaaaaaaacacctgtctttaaaagcattctgacaagaaaagaacctccctttatttctgacataactccttctccgcaaaacgtgcgtgatccgtcaaatctgtaccgcttctgcagcatcgggtgcagtgattgataatgagtaatcgctttttcatacattgaatccgtcatttcacttctctctttcgttttgtatgccaggcgctcggcagcttgagcttaagaatcatgccggctattgtaagtactcctaatgagatcaagaatccgccgcccgaatatagcagtgccgttacacaaaagaagactgactgcccggtgtgaatcagccactttctccgcatgggaagcagccataatacccctaaccctgtctccagcgctcccctcacgatctctgcatcggcacagccatcatgaaagccttgaaaaaaccaatacagactgaatacgagacacataaagacatagacaaacccgaaacggactgatatcttcggatgtctgttttgttctatccaaagccgcaacgcatcaaagctccatgcggtagcccagcttagcagaggacgaaataaaaaccggtctatccaacttcccggcagaccgcgggccgtttcatattgatattgagtcaaaaatgcggtttgtccgttatcccgctctatatacttccagtagcccctgccttcttttataagtgacagcggatgatcagaggcaaaagcgagcgaagacactctttctgacgagcgaagccttatgtcacctattgattcgcccgtgccggataccttcagcccaaaaccgattcgtgtttcatatagaaatctctgcggttcatctggcagcctatgaagatatgtaatgtcagaaaaccgcagatcccattccttatgaagatgcgggttttgcgtatattcccaaagcgtttctatatcagatgcaatattgattgcaacatatatcggcttctgcttcatgtcccctcctcttcccttcttttgtaaacaattcctatattatcataggaacagatcaagcggcagaacgaaaaggccatcccgttatcggcaggacagcctcagtggctttgatgacttatgaataaggtatcgtgtctttattatcttcagaagcggtttgaatgataatcgggcgcacgaaacggattaccgcagccgaggccaaaacggctaatccgcctgcaagcaaaaacgccccggagaatgatccgcttttgtccgcgataaagccggttaaagcaggcccgataataccggccgtgtttgcaagaaaatgcataaagccgccgactgacccgacattcctttgatcaaccacatcatgaattaccgcccaatagatagagcctgttatatataaaaagaagactgataaagcaacgagaataacggcacttacggtagtggtaacaagtccggcaaatccgatcagtacagcggaagcgaacaaacaagtgacaagaatgactttccgtgagaacaaaaccccttttccggcagtttttttgaatacataatcagaaatcattccgcctgccgccaaaccgataaatccaagaatccagggaataacagtcaccacgctcataaattcaacacttaaaccgcgttctttcaccagatagctcggaaaccatgttaagaagaaaaataagatgtaattgtaagcgaaaaaggcaaaagccgtgaagagaaccgttttttgtttcaaataaaaggtcatcgggatatgctgctcatgcggttgaatctccgctttcattgccggggcgtcttccgtcggcgccggccgttctttgacaaatttaaaccagatgaccgcccagactaaaccgatgatcatgatcaggacaaaggaaactttccagctgaacgccacagcaatcatcccgacaatcgggccggaaatcgccccgccgagcggcgtgccgctgtttgtcaggccgatgaccgtggcgcgctgagacggaggaaaccaattgttgaccattttgcttatggcagccgacagcggcccctctcccataccgaataaaacacggataatcaaaagacttacaaatccgaaagcaagcgcaaccgctccgctgaaaagagaccaaacgatcatcgccgtacacaatgtcaatttagccccataccggtcagatgcaacaccgccgagaaagttaaacacagcgtatccgacagaaaaactgctgaaaatcagccccatttgggttgccgacaatgtgagatcctgctgtatgaacggcgctgcaatagacagcgctgagcggtctaaatagttaatcaccccggctgaaaataaaagaagaataatagggaatctatcttttgagaacataaaaaaatccccctctcatttcgcaatattcagacatttaaattgccggagtaaaccggtttatgcaatgaaaccggttatccggattgccttgcgagcagcgccggtttatagcggtgaatccgtttttcaccgccatctttttcttgtatctgacgaagaagaaggcttcccgcttttcgcgccatttctgccgcaggctggacgatcgtcgtaattggaggagtaaaaaaaccagcaaaaggaacttcatcaattccgatgacggctgccttatccggaattgccatatcatgctccttcatatacttcagcacctcaacaagaacgatatcgtttgccgccaatatcgctttcggaggctcctcaagtgagaacagctctgacaaaacattggaaatatcagctgcatcggctgttttgatatattcgtcccgcaccatcataccgtggcggtcaatcgccttcttatacccttcaatcctttctaccctcggactgatttcccgaataatagacgtcgtaataatcgcgattctcttaatgccgctttcgataaaccggtcaacggcaagaccggctgcatgatggttatcaagcatcactgtcggaattccgagttcttcaatggttctgtccataaacacgaccggaaacgtatcgcgtttcatcttttcatataaagagagattttcacccgtcggaaaaataataattccgtccacctgcttagcccgcagcatttcaatatatttcttttctttttccggttcatcatccgcattgcagacaataatatgaaatccttgttcatgaaaatagtcttccaccgccctgatgacctgagtggaaaaagtgtgaagaatattagccaccaccacacctaccgtaaatgttgatttctgttttaagctgcgggcgacgaaattcggctgatagttcagctcttgaatggccgcttctattttttgtttcgttttctcgctcatatagtcatagcgctgatttaaaaattgagatacggtgcttttagatacgtttgcatatttcgccacatcagaaattgtaatggttttcatagactcatccccgtctgccttcatttttcactagtataagtcagaagtaaatggtttacaatctgacagggacatggattctgtcatactccggaataagccataaaacctccgtcgacgggaacggtgaccccggtgacaaagcctgagcatgaatcatccgaaagccacaggagcgttcccagaaggtcttccggtttcccgaaacgtttcatcggtgtatgtgccataatcttattggatcggtctgtcagacttccatcttcctgtaataacaacccacggttttgcgcagtcaaaaagaaacccggggcgatggcattcacccgcagccctttttttgcgaaatgaacagccatccacatcgtaaaattctgaatcgccgccttggccgcgctgtaggcgggcacctttgtcatcggtgtatacgcactcatagaagaaatattaataatcgcgggacattccgccttcaaaaggtcttttccaaacacttgcgatgccagaaatgcaccggtaaagttggttgaaaatacgctggaaaaccccgtttcgtccatatcaaaaaatgatgtgccctgctcatcctcttcatacgtctcgctggcagtgatcgcatcagggtggtttcccccggctccgttaattaaaagattgacagaaccgaaccggctgataatctcgtcttttgccttttcgagcgaatcacgggctgaaacatcagccggtacagaaaccgcggttcctccagcatcagcaatctcggccgccgcacgctctgctttatcagcattccggctgacgatcgcaattttcatcccctgccgtgaaagctcctttgccattgctgaacagagaacaccgctcccgcctgttatgacagcggttcttcctgataaacgttcatgaatcggtctcatcccttcacctttttctcatgagacgagaatgcatcccacagtccgctcaagtacataattcctaaggcacgatcatataaaccatagcccggccggcattgttcgccccagatatgacggccgtgatcaggccgtacatatcctttgtagccttggccgtgcaattcttttaccacaccggtaatatcaatggacccatcactggtaagatgcgaagtttccgtaaaatcaccgttatcgcagattttcacatttcgtatatgggcaaacggcgcagctccagcatagtgtttggcgatcttcaccatatcattggcgggatctgctcccatcgaacccgtgcacaacgtaatacagttggcgggtgaatctgaaatctctcgcagcttttcataacttttctcaccggtgataatacggggcaggccaaaaattgaccagggcggatcatccggatgaatggccatttgaatgccgtgttcctccgctacaggaaggatttcatgtaaaaaaaattctagattggcccaaagctgtttttcatcaaccgtttgataggcctcaaacagttccttgatccgggccattttctccggttcccacccgggaatcgtcaaatcagaagatttttcaaccgtgcggatgagttcctccggagggagactttccactttcgctttttcaaaaaacaaagcggttgacccatcttccagcgcgcggaacatatcggtacgcgtccagtcaaatatcggcatgaaattgtaacagatgactttcacgccgaattcggacagattgcgaatggtctgtttatagtgctcaatatattgtccgcgttcttcatgaccgagtttaatggcttcatgaacattcacgctttccacgacctctgtatgaaacccataggattgaatgaatctgacttccgcttcaatgtcctccttttcccatacttcgcccgcgggcttctggtgaagagcccagacgatgcctttgaccccgggaatttgtctgacatgttcaagagtcaccgtatcattaccttggccgtaccagcgaaacgtgatattcatgttacacccccgtatattcgttttttcggcagacgtattctttgctgagggatacggcagcttcatagccgcccttttgatatgcttttgtcaagtcgcttcccacaccgaccgcgaccgctccggcagagagccagtcattcatgctgtttaatgagatacccccggtcggcataatgcggacattcggcagagggccgttgaccgacttgataaatgaagggtcaaacgaattagcggggaacagctttaccacatcacatccggcttcgagcgccaaagccatatcagacacgctcatgcatcccggaagatacggtacgctgtactggttgcatagagacgctatctcttttacaaaatgagagctgacgataaatgaggcgcctgataaaatggcgtgtctcgccgtttctgtatccattacagaaccggctccaagaagaatatcttgatgccggagttccttaaagacatcttcgacttcaggagttgtgtatgtaagctcaatggcgctgatacctcctgaaatggccgcttttgaaacttcaagcgcctcttggctgttttgtccccttatgacagccaccacttgtgcatgcagaagtttttcgtaaatggcgtacttaggcagcattctcgctcctcctttaatcaaacgtaatgattgcttttcccgccttgcccgggtgctgttcgatcaactgaaatgcttgatggacgtcatctgctgaaaatgtatgtgtaataagaccgccgtgcgttaacaggcctttattcagtaagtctgtaatgtacggaaactgattcgtctgcaatcttgaaccggtgatcgtgacttccttttttgtgatcggaagctgagaaatgccggcagtcctctcatcaaaaccaagcacaaccacatgaccggccggagacaccgcgtcaatggacgtttcaaacgttgaggggagacagacggcatcaatgacgacattggcgccttcattttttgtccattcgttcacccgcaaaacgagatcttctttttgcgcgttgacggtaacgtccgcaccgtttttttcagcgaatgccaagcgttcatcattcaagtcggttatcatgacggaagcgcctttgaactttgccatttttaatatgcagattccgatcggtcccgctccctgaatcaaaacggtatcttccttctcgacacggcctctccaaacggcctgggcgccgatcgtatatggttctgccatgaccgcttcctcccagggcagatcgggggaaacggcatgcagctgcttttccggaaccacgatatattcccgcatcccgccatcttcatgaacgccgaacaccgaaagcgctttgcagacgttcggacgtcctttccggcaggcatagcatgttccgcaataagatatcggttcaaccactacgcggtcacccggcttgaaacgccgaacatgagaaccggtctttgcgacttcccctgtgacttcatgtccgattactctcggcaaagacgctaacggatttgtcccatgataaatatgcaaatctgatccgcaaattccgacccgcttcaccttgacaagaacatcatccgcgtggacaacagacggtttctcacattccgtcaccaccagatcaaatgctttccgtacttgaaccgctttcattttctcacccgctttttaagttgtgcttgctaccgttcaatcacagtctctttgtttacaaatgacagaacctcttctagatagggaagcccttcattgtcaccggaaactgtggtgacgagcgcaccgaccgcattggcaaactccagacgtttttccggttcaaaaccatgcagataactgtacaggtagccggcattaaagccgtcacccgctcctaccgtgtcaacaggcgcaacctggaaagcctctttgtgaacccacttatgatcatgatacagcgcagaacctgcttcaccgtcttttatgacaagctgactgattgaataggtctctgcaaaccgggctaatgcttcattttcccctatacctgtcagctgtttcatttcgtcccggcccgccagaagaatatcagtatacggaaagatttgatgaaatgccgcacgcgcctcctcgatcgtccacagcttcagcctgatattcggatcaaaagatacgggaatcccccttgctttggcgagggaaagcaccctttcagcaatttcaagatttttcttatcaagcgcgaggaacacaccggtaagatgaacgatgtgaatgccggcaaacatattctctgttatatcttccggtgcaagagtcagaattggtgaattgaaacgataataaaacgtcttgcctgaaccgtcatttctgatctctttgacatttaaagatgtaggaaagccttcaacataggagacgtcagtcacatcaattccttctcctttggcaaactgataaatcactctgccgaactcatccttccccagtctgctgacccactttgagtgcagattcaatctggcgcatgcaatcgcaaaattcagttcagctcctcctgcttttcgttcaaaatgggtaacaaaacgcaaaggtcctgtgcttgcgggatttaaggtgatcatcgcgtcaccgatcgtaaaaatgccataatcagaagccacatcaatactcctttccttgaagactaaatcggtttggtaaaccggtttagtaaaactttatatgaaaacccttacacacgcaagagaaaaatacaataaattcaaaaaaatctgttattggtaaaaataacccgatttttcacataaaaaaacccctcacaacaaaatgtaaggggttttttgaaaattatatgcatgtttcctcagttagcagtcttacgttcggggcttgtaccttcttcttccgcccatgtttcaatatgcttgagctccggggtgttctcggctttgaatacgggatcaagaccttttttgcgctgagcggcataatccttatagatcttgtaggctacattactcagcagtaagattgccactaagttaatgagagccaagagtcccataaacaagtttgccatgtcccagacgatctggaagtcagccaaacatccgtacaccaccatcactacaacgaatacgcggtaaatattaagccatgttttgcttgttttaataaattcaatattcgtttcaccatagtaatagttgccgacgacagagctgaatgcgaataaaaacatcgcaatcgcaataaatgtcggcgcccatccgccgaggtggtgctgcaatgcggtttgtgtcacttggatgccgtcgcctttaggcgtaaagctgtacaataaaatgataaaggcagtcgatgtacaaacaataaatgtatcaaaaaacacgccgagcgtctgaattaatccctgcttagccggatgcgaaacatgtgcagccgctgcggcattcggcgcgcttcccatacccgcttcgtttgaaaacaggccgcgctgcgcaccgataataatgatgcttcctaagcttccgccgacgatctgctcaagaccgaacgcatttttcacaatcgcagcaaacagctcaggtaccgctgtaatatttacaatcacgacatacagcgcgatcagaatatacatacccgccatgaccggaacgattaattgcgaaacggaaacaacacgtttcagaccgccgaatataatgaaagccgttaatacagctaaaatgattgcgataactgttttattcacatggaatgcttcgtcaaacgccacagaaatcgtatttgactgcacggcgttaaagataagtccgaaagaaacggtaatcaataccgcgaataaaataccgagccagcgggcgcccagtccctttgccatgtaatatgccggaccgccgcggaattcgtcaccggaacgcactttatacagctgcgccaaggtgctttccacaaagctggaagccataccgacaatcgctacgatccacatccaaaatactgcgccgggaccgcctgttgcaatcgccagcgcgacgccggtcaagtttccggttccgacacgagaagcggccgagataaagaatgcctgcattgaagacactcctttatttccttgcggcttctccccgacgattctgaacatttcaataaagtattggaattgaataaagcgaaaacggaacgtaaagtacaatccgatcccgactaaaatataaacaagatacttccaaataaaatcatttggaacatttatgatttcactgatgaaagcctccatgtttaacctcccttttacatatcttttactgtcatttttgctgcatatgttagatcttttaacacaacgagtattattatatcacaacaacagtggttgagaagtttttttaagaaaatgtttcggtttcttcatacgtcttttgctgtcatgccccgttttttatcttacagcccgaaaaatgttgtcacgtcataaggaatgcgtgcatatcataacaaataggtctttaagaaaaaagagatgaaaagatggatggaatggtatatacttaaccaggataataattttttaaatttaataaatatgtttactttacatttaaattagggtattataataaaaatattcagacttatgaaggggggagaacatttgaaaaaaatcttgtttttaaaagcttctattttatttttagcgattgcaagctttcatttgctctccattccccatgcgttcgatactgctcatcattttaaagcggtagccgaccagcaggaaatgcacgaaatgaaggccggccaaaatgctgatgatgagaaaaaatcgctgacgggctcatatatcttgacggcgctttttgccgcttctgtctcactgatcgtgatatcagacaggagacgccccgcttcccggagaagacagcgaaagaaaagctttttaatcgctaaattttatcagtcctcgtatttcgatgagcttcatgttcaacatcgcctatctatgtaacataagccgtgcgggagataagaaagcagggttttcacaaatgaggaggttgttaaacatgttgtttatcttacgaatggtgattttagggttgttttcattcactgcactgaatttatttgtatggcagggaatcgaagtcattcacgctatcactgacttattcggcagccatgaaagctaaatagtaaaacctccgctcaatgagcggaggtttttttattttatttttactcttaaacatcagacgcggggatacgccatacatctgttaccggccctgtctcatcttcatcggtaaagaaggaaccgttgctgtatcggtcattcgcccgcaaggacttcacggcgatttcgattctctcgcctttttctgtttccgcagcgatcatgtcggctaaagcgcacgcgaatacgccgactgcgcgatgcgggttctttttaagctcacgcagcatgatgacaccgcgcttcgccctggatgttttttcgaattcagataggttcatccgcttgattgctccccgctgtgtgacaaggacaagcgaatctgtctcatgcagaatttgtcctgatacgacggtatcaccgtcttttacatttatgccctttacgccggccgcacgggcaccgactacatttacttcatcttcaccgaaccataaaccgtacccgaggcgggtggcgataaacagctggcagccgccgtctgtgacatgaacatcaatcagctcgtcgtcccctttaaggttaagggcaacaagcgctttcgagtaacgctgcgctttgtaatgcgtcatttcagttcttttcaccatgccgtttttcgtcataaacaataaatatgatgatggatcaaattcttttaccggtatagctttcacgatggtttcatcacggtcaatcgtgatgatgttcgttacgtgctgccccatgtctttccacctgatatcgggaagctggtgaaccggacaataaacatagcttcccttattggtaaagagcaggagaacatccgttgtattcatttcaaattggtgaatcagcctgtcagtatccttcataccgaaatcctggccgttagaagcggcaaatgaccgctggcttgttcgttttacatagccgtcttttgtgactgtcacatatacgtcctcagaggcaaccatcacttcaagattgattttaatttcctcaatcttttcttcaatgacagaccgtctgctgtcagcataggtctttttcaattttttcaggctgcttgtaatgacttttaacagctttttatcatgacttaaaatggcttcgagctcctgaattttcttgctgagctcttccgcttcctcttttagcgccgtaatatccgtgtttgtcagacgatacagctgcaaggatacgatcgcttcggcctgcggctccgtaaatgtgaatttagacattaagttttgtttcgcatctttcttgtcgctgcttgcccggatgacggctatgacctcatctaacacagacagtgccttcatcagtccttcaacgatgtggtgccgctcttttgctttttgcaattcaaagacggagcggtttgtcaccacttccttctgatgggaaatatacgcatccaggatggccgtaagactcatcagcatcggccggcggttatgtatggcgaccatattaaagttataagttgtctgcagatcagtgtttttatataagaaattcaaaatgccttttgcatcggcttctttctttaactcaacgaccacccgaagccccgtgcggtcagtttcatcccggacttcagaaatgccttcgacttttttgtctatgcggtattcgtccattttctttacgagattggctttgtttacttcaaacggaatttctgtaatgacgatctgctcccgtccgcctcttacggattccacttcagccttgccgcggataataattttgccttttccggtttcataagccttccgaatgccgtcgactccttgaattatgcctcctgtcggaaagtcaggccctttaatcacctgcatcaagtcatcgacggtgcaatccggagattcaatccgtttaatgacggcatcaatgacctcacccagatgatgagggggaatatcagtcgcatagcccgctgaaatcccggttgatccgttgacaagcaagttagggaacatggcgggcaaaacaaccggttctttactagtgtcatcaaagttcggaacgaattcaaccgtatttttatcaatgtcacgcaaaagctctgacgcgatagaagataatctcgcttccgtataacgcatggcagccggcggatcaccgtcaatgcttccattgttgccgtgcatctcaatcagcacattccgcactttccaatcctggctcatccgcaccatcgcttcataaacggagctgtcaccgtgcggatgataattaccgataacgtttccgaccgtttttgccgctttacggaaatttttatcgaatgtatttccgtctgcgtgcatggcgtataaaattctccgctgcaccggctttaaaccgtcacgagcgtcgggcagcgccctgtcttgaataatgtatttactgtagcgtccgaaacggtcgccgattacttcttctaacggtaaatcatgaaataattctggctgtgccactattaaacctcctcagcgaccgacaagttttcattttctaaaatattgctttcctcatctaatccgaaggcaacattcttttcaatccattttcttctcggttctactttgtctcccattaatgtcgttacacggcgctctacccgtgccgcatcgtcgatcttgactctgacgagcgttcgcgattcgggattcatcgtcgtttcccagagctggtctgcgttcatttctcccagacctttatagcgctggatggtataccctttgccgactttctttaaaacgccgtccatttcttcgtcggaccaagcatattcaataatctctttcttaccgcttcctttgctcactttgtaaagaggcggaagggcgatgaagacttttccgtgctcgattaaaggtttcatatagcggtagaaaaatgttaacagcaagacttgaatgtgcgcgccgtcggtatccgcgtccgtcatgatgatgatcttgtcataattgatgtcgtctatctcaaaatctgcgccgacaccgccgccgatcgcatgaataatcgtattgatttcttcatttttgaagatgtctgcaagctttgctttctctgtgttgatgacctttccgcgaaggggcagcacggcttggaatttccggtctcttccctgttttgcagaacctcccgcagagtctccctccaccagatacaattcattcttcgccggatttctggaaccggccggtgtgagttttccgctcagcgtcgcttctgattttttgcgctttttgccgcttctcgcttcttctctcgctttacgggccgcttcacgggcctggcttgctttaatcgcttttttgacaagcagggttgctgtatcgcggttttcttccaggaaataagccagattctcggaaatgacggcatccgcggcggatctcgcctcacttgtgccaagcttccctttcgtctggccttcaaattgcagcagttcctccgggatacgcacggaaatgattgcggacaaaccttccctgatatcggcgccttcaaggttcttgtctttctcttttaaaagggcgacctttcgcgcatactcgttaaacgctcttgtcattgccgttttggctcctgattcgtgggtgccgccgtcctttgttctgacgttattaacgaatgacagcatattttctgaatacccgtcattaaactgaaacgcgaaatcgacttcaatgtcatgatgctcgccttcaaaggaaaccacttcgcataaagcgtctttttcctcgtttagataagcgacaaatgcttcaattccgttctcataataaaatacttcttttacgccgttccgttcatcaattaattctattttcaaaccttttaacaagaaagccgattcgcgcagacgttctgacagcgtgtcaaaattataaaccgttgcgctgaacattgacggatcaggtttaaaatgggtaagcgttcccgtttttttggtcgttccgattttttcaagtgaagtcacgggcttgccgccgttttcaaaccgctgtttatacatatatccgtcacgctcaatagtaaccgtcagccactctgataatgcgtttacgacagatgcgccgacaccatgcagaccgccgcttgttttatagccgccctgtccgaatttccccccggcatgcagcacggtgaaaataacttccggcgtcggctttccgagcttatgcatcccggtcggcattccgcgtcctctgtcctgtacggagatgctgttgtccttatgtatcgttacgataatatgatctccgtagccggcaagaacttcatcgacggaattgtcgacgatctcatataccagatggtgcaggccgcgtgcgtccgtcgaaccgatgtacattcccggtcgttttctgacggcttccaggccttcaagcacctgtatggcatcttcgttgtaatcaaattgctgttttctagccaaacgtacaaacccctttcaaaaaacctgctcttaatcattttcttttttaaatgttttcatgtctttgtttttcagtatgcgcaagcttcggtccaattctcctcggactcacaattataaccaatatgcttgatttcgcaacatatttaagcgaatggctcgttttttaggccgcaagacatacattcgaacggcttttcatctttctggtgcccttttcagcgaataagaacatgagttcgctttctattatatagctttatgccggccatcgcaaacagactgtaaacccctgtataaaggggtttctaaaaaagctgttcatgctttattgtatctgtttcatcatcatacgcaaagagtattctttcaataaaaaagcaaaaacccctgatttgccaaggatttttgctttttttgttcctattttataacagcgcgggcgacttttatacataaatccataacagccgtccgtcctttgtctgtaatcatgcgatacgcttcttcatttgcaaggccctgctgcgcccaaaaaacgggagcgtccgtctgtaaaaattcttcagcgacgccgggaagctgctcagagcgtctgaacacattcacgatatcaatcggtccctccacgtcttttaatgaagcgacggctttaacgccaagcgcctcatcaatcgttggattgacgggaataatttcatacccttcatcctgcatcgctttggaaaccatgtaagaagtccggtcgggacggtctgacagcccgacgactgcgatccgtttgctacggtccagaatttctttaatctctgattttgaaggattttgcatctttaccatctccttttgatatattgtacatgaccgcttcgccggaatcaaaaaaagcgctttgtcagcttaattctcaaaaaacttgtcatcagacggtaacaactcgtgttaaaatagagtgaagggacattgaaaaggagaaatgtagatgttgattgctttattgattattttggcctatgtaataggcagcatcccgtcaggtttaatcgtaggcaaacttgcgaaagggatcgatattagagaacacggaagcggcaatttgggcgctacaaatgcttttcgcacgcttggcgttaaagcgggatctgttgtcatcgcagccgatattttaaaaggcaccttggccgcggcgctcccatatttactgcacgtccccattcatcctcttctcgcaggggtggcagcagtaatcggccatgtattccccgtgttcgcaaagtttaagggaggcaaagccgtagccacatcagggggcgtcctgctgttttatgctccgctgttattcgttacgatggttgcagtatttttcgtatttttattccttacgaaatttgtttctctgtcttcaatgttaacagggatttatacgattatttactgtctgtttgtaaaagacccttatttattagtcgtagtgacgctcttgaccgcgtttgttatctacagacacagggcaaacatcaaacggattataaacaaaacagaaccgaagatcaaatggttttgatgaaacttcaattttgacatcaaaatgccatatgcgtttataatagagataatttctttatatgagaaacaaaaagggagtgttccggatgaacatgaaagtaacgaaaggcgcgctggattggtacaaagaagagctcgatctggaaacaggcgaccatgtccgtttctttgtccgttacgggggatgcagcaacgttcagaaaggcttttctctcggcattttaaaagaccggccgatgaacatcggcaccagcacggaagttgaaggcattaccttttttattgaagaaagcgacttatggtactttgataatcacgatttgtcagtcacatattcagatcaggcagaagagccggtatttgattacgtgtaagaaaaaaagaacgcagcggatgcgttcttttttttacagcctgaaccttttgagatgatcagtcagatgttctttttctaatatgcttctttgcgtatcaccgagcaggtcaaagtggggaaattcatttttatggtgaatccactccggcttcagcccgtactccgctccccatctgatcagtttattgagatcgcttgaaccggccttcgtcacggtcttagcctccggaaagcggtcgtccagccagtaatgcgttaaaaaagcgattttcccttccgatacatcccgcttccatctttccagttccctgcgcgtaattccaaatgccataactgcagccgctccttatttttttgccttttcgtaagcggcatgccaatcaggaaaagccttgcgaaactgaatcggtttgaaactctctttatcaacgcatatatgagaggatgtcgccttgatggcaagttcttgatccggattatagatgtggtagccgtaaacggttttaaatccgttatattcttcaatccaagtatgtacgacagccgtttctccgtagcggagcggctttttataagaaatgctgatatccaatacaggggacagcactcctctgtcttccatatccttgtaaaggaatccgagttccttaatcagcgccgttctgccaacctccatccagactaagtaattggcatgatagacgatgcccatttgatctgtttccgcataacgcacttctatttctttttttgacacatgcaacgttctctgctcccttattatcagattagccccattttatcacaacgagccggaaagagaaaaaaaccaggtttccctggtttttattatgattgatagccgttttctcttgcagccgattcatcctggatttcactgcggaacgattcaatgctttcattgcgtctggcattcttctcttgaatgcgctgtttttcctcatctgtcgcaaattccattgattctttggcttcttctatattttcaattgtattctggaccatatcctgcagcttttcaacgttatcggaacggtcatccggatttggtttttgatcattgtttgtcataatgtctgctctcctttgttgatgttattcgcctttcgtctgcatgacaatcggatgtccgtttgacttgtcatgaaacttttcccctttgttgcgtttatatttaacgggttttgtccctaagtggctcggagcgtattgcggctggccgtctttcttgtttatgcccatgttcatccctccttaagagtatattttgcaaaaggaggtgcaaacatgactgcaaattaaaggttatttttgtttgaaccgctgctccagcttttcttcaagctgattcaaatattccgtattggtcatcagctcacgtttattttccataaccaattcatgaaaagaacgttttcgcatttttttcaatcttctcacctccgtgttttcattcattttttccaatttttcaaaacctaagtccttcacaataaaaaaactgaacctctatttgagatccagtttttctttcatttctttttttgtcatcgtgcctacgcgaatgtgctgaatggttcctttttcgtctaatatgtatgttgtcggataagaaagcacgttgaaatctccgttaattccgcttttgtcaatcagaataggaaaggtcagctgataatgatcagcaaatgatttcacagcctgtatatttttttcagaggacgtaaaattaacggctgctaccgcaatatcaggatattctttctgcagctcctgcatatcaggcatttccattcggcacggcttacaccacgtcgcccagaaattgaggagcactttttttcctttataatcagaaagggagatactttttcctgacaatgtatcaagtgtaaagtcaggggctttcatcccttcttctgtcccttctttcggacttttttgtacagaataaatgttccagcccgcatacactaacaacccgataagtaacattccgcccagccatttcgcaagcatctcaaggcctcccgcataaaaagagagaaagcagactgctttctctcctttgttcattctgctactgtttcattttatcgcgaagcaccatttgtaaaatgccgccgtggcgatagtaatcaatttccacttcactgtcaaaacggacaacaacttcaaatgtttttaccgtaccgtcttcactgattgctctgacagtcagcaagtcgcgcggacgtacagattcatcaacatccacctcgatgacttccttaccggttaagccgagtgtatccgcgttttcaccctgtttgaactggagcggcagcacacccatgaagacgaggttgcttctgtgaattctttcaaagctttcggcaatgactgttctgatgccgagcaggtttgttccttttgcagcccagtcacgtgaagagcccattccgtaatcttttccggccaggacgacaagacccgttttatcatctttataccgcatgcaggcatcataaatagatgtcacttccccggtaggccaatgtgttgtgtatccgccttctgtacccggtgcgatttggtttttaatgcggatattggcgaatgttcctctcatcatgacttcatggtttccgcggcgtgagccgtaagagttaaagtcacgaggagaaacgcctttttcctgcaggtatttgcccgccggtgtgtcttttccgatcgctccggccggagaaatgtggtcagtcgtcacggaatcgccgaatttgccgacaacgcgaagtcctcttaaaggctcaacttttcccggctctacagacatttcctcaaagaacggcgggttttgaatgtaagtggaatcctgatcccacttgtacagcgcttcatccgtcgtttcgatttcgttccagcgctggttgtcgtcaaataccgtttcatactctttgcggaataattccggcgtaacagtctgtttgacgagagaattgatttcatccatggacggccagatgtcatcgaaataaacattttgtccgtcatttccgacaccgatcggatccgttttcaggttgatattcacagtgcctgctaatgcgtatgccacaacaagcggaggtgacgcaaggtagtttcctttgacaagcggatggatccggccttcaaagtttctgttacccgacaagacagaagtgatcaagagatcatttttagcaaccgcttcttcaatctctggagaaagcgggccggagttcccgatacatgtcgtacagccataccctacgaggttaaagccgagctccttcatgtaaggaagcaggcctgagttgactaagtatccagtaacaaccttagaccccggtgcaagtgatgttttaacataattcggtactttcaagcctaattctaccgcttttttggctaccaatccggcaccgattaatacataagggtttgatgtattcgtacagcttgtaatagcggcgattgcaatcgctcctgttttcataaccgcatcttcaccgctgttaagtttaaatgaaatttctttgttctcttcagcagtatccgctccgaatccttggttgccggccgggctgacaagatgttttttaaacgtttcctgcataacggaaagcgggattaaatcctgcggacgtttcggtcctgaaaggttcgcttcgatttttgacagatcaatttccacaacgtctgtaaaaatcggctcttccgcgtcaggcgtatagaataaaccgttgttgcggcagtatgcttccacaatatcgatctgctcttcttcacgaccggtcagacgcaggtaagaaagtgcttcctcgtcaaccgggaagaatccgcaagtcgctccgtattccggcgccatattggcaatagtcgcacgatccgcaagcggaagctcagcaacaccaggaccgaagaattcaacaaatttattgactacgcctttttcgcgcagcacttgagtgactttcagcgccaagtcagtcgccgtcgttccgttaggcaattttccgacaagtttcgcgccgatgacctcaggaacagggaaatatgaaggctggccgagcattcccgcttccgcctcaataccgccgacaccccagccgaggacgccgattccgttaatcattgttgtatgggaatctgttcccaccaatgtatcaggatatgtcacaagttctccgtcttcctctttcgtatgaacgacacttgccaaaaactcaaggtttacctggtgaacgatacctgttgcaggcggaacggcctgataattgttaaacgctttctttgcccagcttaaaaatttataacgttctgcatttctttcgaattctaagtccatattaatggctaacgcgtcttccgtaccggctttgtcgacttgtacggagtggtcaatgaccaggtcaaccggaatttcaggattgattttatcagggtctccgccgacagaggccatggcttttcttaaagatgccaggtcaactacggccggaacgcctgtaaagtcctgtagaataacccgtgacggtttaaacggcacatcgatatcttttaattcagcagtaccccatcttgctaaattttcaacatgttcttttgtaatgacgcgtccgtctacctgacgcaaaacggattccaaaagaaccttaatagaataaggaagttttgaaacattgccgacccctgcgtcttccaatgcttttaatgaatagtagttgtatgttttcccatttgaagaaaatgtttttcttgcttggaaaacgtcttgtgttgcgactttttgctgatttgtcattctccaaaatcccccttcaatgatcaagatcgttctttagatgaatgttcacattccatcacaattttctcacaatttcatcttagtataaaatcatacataagtaaatatcaatgtttttattaaatacaataagatcgtcttatcagcatgattttcggtaaattttgtccgattttccgcctcatacaacgggctgtaaagagccatattaatgttgaggtgatgatcatggtaaaacggaaagccaatcatgtcattaacggcatgaatgatgcgaaaagccaaggcaaaggcgcgggttatatagaaaatgaccagctcgtcctgacggaagaagaacggcagaacaataaaaaaagaaaaacaaaccaatagccggaacaccttaaaaaggaggctttaacatgacaaataaaaatacgagtaaagatatgcataaaaatgctccgaagggccataaccccggccagccggaaccgctgagcggaagcaaaaaagtgaaaaaccgcaaccatacaagacaaaaacataatacaagccacgatatgtaaaacagaccccgtgtctgtttttttgtgccattcacccattcaaagcttctgcatacgttatagcaaggctttttaatatggaggaatgcttccatgaatcactcaaaaaacgctgaagaatttgatgatacggaagaatggctgcggcagttttacgaggacccgtatgcttggtatgacgagacgctgccgatcgatctatatgaaacaagccgtcaatatatcattgaagccgacctgacggcgctgaagcaggtgcaagcgataaccgtcactctttcgggaaatgagtttatgctctctgttaaaacgcttgaacggacgttaaacaaacaaatgatgcttcctttttatctgaatgacaaacatattttcactgatttcaccaaccatattctgaccgtctccatgaacaaggagccaaatgagactcctgcctctttttcctttcaatttcctctataacataaaaaagccgctttcatccctcaatggaagcggctttttttgtccggtcatatcagtcatataccctcaaagtgaatctcccatggccaaatagcagaatcactatacgatagaatatgttctaccaaccggaatgactggacatctatcattttttctattctttttttctattctttttttcatgtgttcttctattctgtcttcgtttacaatatggttaaagtaaggaggagatagaacaatgctggaaggctggtttatgtggtttattttattttgggtcatcgtgatgatcggattgctgtctatcggcgggttttttatgtttcgaaaatttttaaaacgcttaccgaaagaagacggccggtcagaactggattggcaggactattatattgaaaaaagcaggcacttatggaatgagggtgacaaggcgtttttggatgaactggtcgcccccgtaccggagctctttcgggatgtagccaaagcgaaaatcgccggaaaaatcggtgaactttccttagcggaggaagctgaacaaataaaccgtgatttaatcatcaggggttacatactggccacccctaagcgtgatcatcaatttttaaaaaagcatctccgtgaaaaacagattgatcttactccttatcaagccctgctcaaataaaaaacctttccggcggacggaaaggttttaattcatctgaatatcagcggtcttcagttcattcgaaagtttgcggtaagacaaaaacatcgcgatgcgccacgggacaatcattccgaaagccagaatccaaaacattccgcttaaagctccgtaatcaatcgtcgtgctcaaaatggatttcatagcgattctgataaccaagagaccaatcaggataaacacaaacgcttttgaccgttttaaatagatttcattatttttaatctcaaatttagatgttttaatcagaaaaatagagaagatcacgcccagcgtaatggcctccaaaaattcttcgcccgtcactctgaaaatcggaaaaaggaacataagcgctcccgtactcatgaaaatcggcgggagaattatttttttaggtgaagcgggcttgtcggaggatttaatcctgacgatcatcacggaaattgccatggccgctgcaataacggatgaaattataatcatcatctttatcattcctttgcttgcacggagtttaatactatatactatactccaaaaacataaaaaaaaccaatttgaaaagagaacacgtttacgttcccgttacccggccaacggcctccagcactttagatgcttcaaacggtttaacgataaagtctttagcgcctaattcaatcgcttccagaacgatccgctgctgccgcatggcggtgcacatgatgatccgggctttcgggtcaaaagctaaaatatcctgcagagcctgtataccgtttttgaccggcatggtaatatccattgtcaccaggtcgggacggattttttgatatactgacagggcttcctcaccgtcagccgcttccccggccactgtgtaattcgccgattccagaatctctctgattttcaccctcatgaacttggcgtcatctacaactaaaactcgtgtcatattcccctccacatatttaacattaactagtcttattgtaccaaaaacaaaagggtatataatagttcaaaagttattaatccgttacagaccggtaaatcctccgaaaagatttgacagaacgatcagaatgtagctcatccagttaaaaaacagcataactccgatcagaatcataagaatgccgccgattttcatgataagcagctgatgcttgcgaatccaattcattctggtaataaaaaatgaaagaacaagaaaaggaatcgcaaacccgagaacatataaaaacatatacggcactgctgaagaaggatttgtattggccagcgaaaacacggctcctaaaataggcccgctgcacggcgaccagccggctgcaaatgcaagaccgatcagaaccgaaccgataaacccctccggacggcgcttaaagtgaatgcgccgctctttcatcatgaatttcggctgaaacacaccggcagtaatcagcccgaaaaggatcagcatgatagcgccaaactggcggatcgcttcatgatattgggtaaaaaaactgccgataaaagaagttccatatcccaatgcgataaaaatcacggagaaaccaagcaaaaaacaaagtgtatgcacgaggccacgcttttgcagcatcaccttttctgttttcacctcgtccatactgacaccagttatgtaagataaaaaggcggggtacaacggcagacagcatggagaaatgaaagacagaaatccggccccaaacgtcaaaaagtaattaaaactcacgatgacacactcccttcgagttatgacaaaatcatttcatttttttaacactttcccgagaaggattactttttatagaaaaagcttatataatttaatttgacatcgagatattatactccttcttatttgaaaaacagtataaatgtggatataataatagcgactcaggtgaaagatttatgtatgaaaggatatatccctgtgattagagagcatctattaaatgaaattgaaaaaaaacgggcagagctgcttaaaatcgtcatgacaaacggaatgacatcaaacattacgatagaactcagccaggagcttgaccaccttctcatacaatatcaaaaagaactgcacaccggcagttggggtgaaacatgacgccaaaataaaaaaccctctccgggttttttatttttataaccatgtatctctatatcataatctgtacgtattatttcgcttgattattcatggctttcatcatttgattaattttcttttgagaaggtttcattcccatttgcatcatcatcatgcgtagcatttgttcattaataggcggattctttttcaaatagctcatcatatatttacgagcaataaaaaacccgagtgcaacacctatgagcaatgcgacaacgcccactaggatgccaacccataaagtcattttatttcctccttcatgttgtctagtttaaagtgtactaaaccaaaggctattatacaacatttacatctctttttcctcgtttttagacaaaatttctttctctgaccggatttaaccacccgtagcgccgtgtcttgaaatccattgcaagaaaacaggggctgattttacgcagaatctcaaagaaaatcgtttccgcctcataatctcccgaagccgcaatctcaattaaactgtctttcatcatgaaggtggcgcggcccttttctccgggcagtgtaagccggtaaatggaatccaaacggctgtaactcattcggtttaaatgcagctggagacgctgatgcatatgtatcaccggaatcggttccgttatatattgaacttgcttttctgtcatttgatattcctggggtgtcaggtctgtccaatgatagtctcgaaacaactcaaacatagccgtttcccgcccgaagtagtggttcgcaaactcatcctttatcaggtgcgtatagtaatgacgttccatttcctcatccccttttacagcgcttcgttattgctttctattatacaaaaggagaaaagaaagaattgtctattactgttacgccgccccttctatttttgtcgcataaacaggaaaaagaggatgatttgactcatcctcttttgtctcgttatttgtttaaaagttttttcacgcggtcaaccacgttttctgcagtaaacccgtattctttcataattgtttctcccggagctgaagcaccgaaacggtcaattgcgagaacgtctccttcaagaccggtaaatttgccccatccgaagcttgaacccatttcgatcgcaagacgtttcgtcacattcggaggaagcacgctgtttttgtactcggccgattgtttttcaaagcggtcccagctcggcatgctgactacagatacgtgaatgttttcttcagccagtttcgcttgagcttcgatcgcaagtccgacttcagaacctgtcgctaaaagaagagcggccggtgattccgtttgggcttttgaaacgatataagcccctttttccacgcccgcatacgcttcttcagcctgctgatcaatcgtcggcaggttttggcgtgtcaatacaagagctgtcggatgatcttggctttgaacggcaaccttccatgcagctgcggtttcatttccgtcagcaggtctgatcacagaaaggttaggaagtgcgcgtaaagaagcaagctgctcaatcggttcgtgagtcggcccgtcctctcctacggcaatactgtcatgcgtgaatacataagtgacgggaagacccatcaatgacgccagacgaatggcaggtcttaaataatcagagaacacaaagaatgtgccgccgaatacgcggaggccgccgtgaagcgccattccgtttaatgcagcgcccatcgcaaattcacggacaccgaaccagaagtttttcccggcgtagtctttggccgtgaagtctcctccatttttgattgtcgttttatttgaacccgcaaggtcagcagatcccccgacaaagaaaggaattttcttggcgatcccgttcagcacctcacctgaagatgcgcgggaagcaaggctgctgcctttttcataaacgggaacttcctgatcccagtctttaggaagctcgcctttcatgccgagtgacagctgttcagcaagctcaggatatttttctttataagccgcgaacagttcattccattcctgttcttttttcgagccggcttcttttacagcttgattgaaatgcccgtatacttcttccggaacataaaaatcttcttcaaacgtccaagcatacgcttcttttgtcagcttgctctcttctagtcctaacggagcgccgtgaacgccggatgtgcccgcacggtttggagagccgaaaccgatcgtggttttcacttcaatcaaagtcggttttttatcattctggcgcgctttttcaattgcagccgtcaattcagcgatgttgtttccgtcctcaacataaagaacttcccagttcattgcttcaaaacgctgctttacattttcagagaaagaacggtctaaatcgccgtctaaggaaatgtcattagaatcgtataatacgatcaggcggcctaattcaagatggcctgcaagagaagcggcttcggaagaaatgccttccattaaatcaccgtctccgcaaatactgtatgtataatgatcaactacgttgaaagaatcacggttatatgtctcagccagatggcgttctgcaattgccattcccactgccattgcaataccctgtccaagcggcccggtcgttgcgtctactccggctgtgtgcccgaactccggatgtcccggtgttttgcttccccattgacggaactgtttcaagtcttcaatgctgaggtcatatccgcttaaatgcagcatgctgtataaaagcattgaaccgtggcctgctgataaaacaaagcggtcgcggttaaaccagcccggattctgcgggtttacattcataaatttcgtccacagcgtatatgccatcggagcggctcccatcggcatgcccggatgtccggaattcgctttttcaattgcgtctatagatagtgtacgaatggtggcaactgatttcttttcaattgtatccattataatccccttccttattgttgtaccttttcatcataaagcgatgctgactttttctcaactctttcagcttaaatttgagataaacttgttgaaaattgtcgtaaagcacagcctgatattagtatatacgaaaaaagaatacgtattgccgtattctttctgtttaatgaagattatttttctgttgttctctttttaatttttcaggggtgacatcgttgccttccggatcaatcacttttacgctctttaacgtatttttcattgaggagcggaatcctttcaaatactcctggcgaagcttttgctgttcagctttttcctcatccgttatcgtgtttgatttagctttttgagccaattcgttaattcttgcgattttttctttagaaatcataataagctcctttggtgcgtgttgattatatactactaaaacgcagtcttttttacaactgatgcgcgtcagctgccttctgtgtctgcggtatattcctgaaaccgccggtgaaccgtggctttggacacatcgtagccgaatccccttaaggtcgctgcgatttctgcaaaggtaagcttgttggctctcagcctgataatttccgaaaccggaacctcttttttttcttttccgctgttttcatgtctgtttttcagattccgttcaggtttgtagccgtttttcacggctcttttcattccccgccggattttcatattgtgaattttcctttgatattcctcaacaatactgacgatttcgagtaccatcgaatcagcttcggaaagctccagttcacctttatgagccgtcgtatatatttttacgttctccctgtaaatgcaatgcaaaagcgcaatcttggcgtttcctcttcctaatctcgtttcgtcctgcaccaatatcgcgtcaatatgtgattttttaatttcatcaagcatttcaaatactccgtcgcggtccatttcgtaaccgctggctttctcagaaatgactttcacgacttccatgccgtttgcagcagcaatctcactgagctcctcttcctgtctttttaatgatgtttgctgctgttctttgtttgtgcttacgcgggcataaatgagcgccttcatttctctctttcctctctaattgacaatggccagctgatatacggccggatgctttttcttaaccggaagaataagttcgtctccgggctttatatcagcagtttggagatgattattctccgtcacccactcaatgaaatcttctttattaatgtgtttcttttctgctacatgatccgcaagtgaccagagtgtatcgccgtcctgaacctttattttaacatattggctgagggactgatcatttcccgcacatgagacaagtaaaatagcggcacttaaaatcgcagtaaacagtccgacaaatataatagattctttcgccatgtaaacaacctccgataagaatgtttgttcgctttttatacctttcagtatatacgaacaaacgtttctgtcaatcgtttttttcgaacctatgtttgtactgtcaggaaaatcatgctataatctacttaaaatcgacgttttgaggtgcgaaatatgacgaagctatcaaaaaggcagcttgatatcctgcgttttattaaagaagaggtaaaaacgaaaggatatccgccttctgtaagagagataggagaagcagtaggactggcttccagttcaaccgtgcacggccatttggcgcggctggagacaaaaggcctgatcagacgggacccaactaaaccgagggcgattgaggtattggatgaagaagaagtccacattccgaaaagccaggtcgtaaacgttccggtcatcgggaaagtgacggcgggtattccgattacggctgttgaaaatatcgacgagtattttccgcttcctgaccggatggttcctccgggcgaacatgtctttatgttagaaatcatgggagaaagtatgatcgacgccggtatttttgacaaagattacgtcattgtcaaacagcagaacacggccaataacggagaaatcgtcgtagctatgaccgaagatgatgaagcgacggtcaagcgcttctataaagaagacaattatgtacggctgcagccggaaaatccgacgatggagccgattatcctgcaaaacgtaagcattttggggaaagttatcggcgtattcagagccgtacattaattctattaaacttcatttatcgtaaaaaaccccttacagaggggtttttttttgcataaaaaaagcagattcgccctggcttaagaaacgaatctgctaaggaggaaaaacttacattcttattatccgacatcgcacttttgaagtcaactaataatgtttccctcgagaaacttttcattcatttttcaactttgtatatttgtgcgtgatgaatttacttttgtttatgttttctttggacgggtgcattaaaatttatgtatgaatatttagtacatagtacaataagttatatttaaatataaaaaaacccgctgcctttagcgagtatctattttcaatcaaaatgataatattctacaccgtataaccctttaatatagacgggcccacagacgtttgaagaactttcaaccagaatcctgtatttgtgatacggatcaattgattttttatcctgggcactgaggtttaaccagctgccgctgtagtttttagaacttaatgtataaaaattcccgttcagcgccatccgctggagtttcatgcttaaaccgcacgaagagttgttcattatggtgaacttatatcctaaaaagtaatcgtcggcagctacagcccccggattttcaatatgaaactcttttgcatttccctccaaagtgaagcttgtttttgatccgaattcagtggtagccgcttcagctgagtgtattccgctaaaacataataaaaaaacagcaatacatatccagtattttttcatttgcatccccctttttacatattttaacttgtgaatcctgtgatgtctattcacattttattaaaacgtatactttataaccactatataccagtttaaaaatttgcggattgcttacaatgaagactaaacgaaataacgaaggtggttcaaatgaaacacgtaattgctttcgcttctaaaacggcgctcacacttgctttactgtacattgttctggatcttatgtaccaagtaacctttttaaacgttctgtttattacagtgatcttaagtttaatcacttattttgcgggtgattgcatgattctgccgagaacaagcaatttcacagccgttgcagctgatttcggaatttcattcattatattatggatattccttatgaacattggcggatttaatgtctctcctgccgcggcatcggttatctctgcactttgcatttctgtttttgaggcattttttcaccggtatttgcagcaatatgtacttcccgaagattatcaggacacaacagagacggatagcacgctatggagctatcaaaccgaggcgtctgaagaattagtgccggaaaaagaccctcaggaaaaaacataaaaaggaggcaatcgcctccttctctttttatttttgcttctgatcgtccagcggcagctgcagcagtgagtctgtgcctgtcgctttcggtgtttttccgtcccatttttcaatccatttatatttgatcatctcatcggacattgatttctttatgatttcgttataatcagcgatcccttccgcttcaatttttttctttttcgcttcggcttcggctattttaatttcagtttgtgtccgttcaagttcctgtgaagacttcacccttgcatcgatggcttcctgtgtggctttatccggcttcggtacgccaagtgtcagatcatcaattaaaaatccaagactcttcatatcatcagcaaatctcttttgaacatcggcagcggcttctgcagatttttgcccgtatgtgtcaataaccgagtatttgctgattgattttcgcgccgcatcccacagccttgtttttaaatatgtattttcgattgtttcaacgtctaccgcgccgaatttgttaaacagatcgactactttgtcaggctgcacgacatagttgtaagcgatatccatttctatatttttaccgtctgaggttgccacttttatattttcattattcactgtctgcatacgcaccggatattccgttactttattaaataaaccgactaagtgccagccttggtccaatgtgtcggattttaccccgccattcggtgagtatacaaccccgacataaccgttcggtattttttcaatgaatagtgacgctgtaacgcccgcaattaaaagggctgcacctataatcacaccgccgagaattttttttgtgtttccgcgcttattttcgctcatgctgatcttcttcctcccatgactttttgaattttttggctccgcttcccacttgtttaaagattggactaagcatcagccataaaccgaatccgatgatgacaagaagaatgatagacccgatcatcactttcatttgcccacctcttttctttcatcctgtcaattatgtatacgatcttaagaacttaaagtttcataaatttcaaaagaaaaagccccgccgacaaaataggcgtgcttattaataattgtcactgataaaatcagaaaccgtttttgtgaattgataaaaggtcccattttgtgtggatgctctgcttttcagcgtaaaagtgtcaaatagtgattttctgaacccggtgctcatttcaatttgaatactcaatccggatgaagattgattggcaaggttgttcggactgacgcctgcatatttatcatttatgccaagaagaacggcaggatacccgtgccgtttcagcacatcggtcaaaagttcggcccgttctctgtctgtaccgccgatttttatctttttatcatcactgccgtaaccgtgcaatgaaatgacatgagagtgctctttcaccatttgcacggccttaggttcatcgaaatgcgaacttgtcaaatgcagagccgcattaccggctggttttaacccttcaaataaatataaactccggttttcggcaatttctctggctaactcactggtccccggctctatgcctccgccgtgtatagctaatatgaggacagaagggtcatgctctcgcgttgaaatggaaaaatcggaaggatcttcattcagctttaattcctcgaaaccgccgtaaatatctgaagcggcatcagcccgaaagaacggcagaagcaaaaacggtaaaattaaaactaaaattccttttttggttattgatggcatttgtatgtttatgttacaatacaaatgcttcagcctttgaagcgaacggcagaacagggtgactttggacggtttcttctgctctgcctctttgccagctgctttacggtctactcttctaaccctttttgccataacatcatcctttcttttgtttacacttttgtcacaatattatatacgttggacaaaacctccgttcatcttgaagaataaaaacatcaaaacaacttctatcctttaacctaaaaaagtctttctgttcaaagagacggaaggcttaaatgataaaaatgaaacccttctccagtttgtgaggagagtgaggactgcagggaaatcattttatcaatatgctgagttaggctggcgtccggctcaaatatttgctccggcatagacggttacggagcggccgcttatttcgaagtcaaattcgaacgtgacgtatgatttcccaattcaagaatccccgaaacaaatggatgtaactgctgtttccataaaaaaaagactgctgttaagcagtcttttttcgttttatttcgtgcctgttgatcccagtccgccacggtcattgttcccgagcttgtctacttcgatcagctccacttcaggcattttcttcatgattctgaattggcagatccgctcccccttggaaatgtcggtatcccgaagcgcgaatgcaggaaaaaaccagaagtcattgtcgcctttataagattcatcaatgactcccattgaatttgtctgaatgataccgaaatgcttatatgtacttgaacgcggaacgacatgggcctcatagccttccggcagttccatcgcaactccaagcgggataagtttgaattcaccttttttgattgttatatcttcagctgcccgcagatcaatccaatcgccctgttcaattttactaattctcgtttgcgtatcatctgaatatttaattttgatttgtaaagtcatgttcgctgctccttttgcttccctatttcggtcggtattgatgaccaatccgtgccccattataccatttaactgataagaatgttgattttggtgtatatacagccgaagaggaagcactgcgaagccaatgagaataaacctaaaatgagggcccctcctatcagtttttcctccattttcacatgacagcttcaattacaataatataaagctttatatccgttctttcaacagagcttttttaaaatttcaccttggtttcaaaaggaatttcgttctgaataaagaatttgaagaataagcgcttaaagggcgcgcgactcttttctgtcccctgcctcaggcgcttatatcaaaagaaagaggtgtctttagaatggttcaatttaaaaactttcctgatccgtctttaaacgccccattgcagtctcgccctgcacagccctctgaattggagcatctcaaagcaaggatgcagaattttattaagcattccgcaacggatgataatcttgagatcgcagatgcccgggtgacggcggaaggaatggtcacctcacttttaaaagaacggcttgatacagaatacgaaatgcttatgaataaaatcacccgggaagtgaatgtggaggactacggagcgatccctgacggccgggacaatacggaagcctttcggagagcgatcgggaacggccgggtcaaagtaaatgttcccgcaggagaatttttggttcaagggataaaactcccctcatggactaccatttccggtgagggacaagggattaccgtgcttaagcttcatgaggacactcccgcattcgaatgggtcattactaacgatgattacgaaaatggaaaccgtaatatttttgtcgaaaacatgactttagactggaatcctgatcgtcaatgcggggtcaggaaccccggaggacagttttccagctgtttaacgtttgctaatgtgcaatacggctggattaagaatgttgaaacggttaacgcgggtctccatggtattgatattacatctccgacttacgatcatttgcctgaaacagaatggacgaaagacggctgccgatatatatggattgataactgtgtggcatacggcgccggagacgacggcattaccacccattacagcgagtatattttcatctccaactgccattccggaaacccccgcggcacagagcatgctgagggcagcgcaaactcgaacggcattgaaattgacgacggctctaaacatgtttggcttttaaataactatacgagcggtaatatccgcgggattgaggtaaaggcgcacagcctgtggccggcttctcaaaatgttcatattatcggtcatgtttcgtatcgtgatgtacgttcatttgatattcgtcatatcggccatcatcaggcctcagatcccgaaagcacgacggcttatgatgttactttaaccgattgcaccgcgattgaaccggtattcaatgctctctatgacggtgtgaccccgagggcgctggtcatctctgcctataaaaacgttaatgtaaacggattcacagctattggtgatccctcatacgactatggcgggaatccagtcgtagctcttcaataccgcagtcaaaatattacgatcaacggcattaaaatacgcggctttacacaagccggtgttgacatcaatatatccggcggatcaaataaaaccgattatgttaaaattttaaattttgatatatacaagtcatctcctaaaggcatctcaatcggcggaggccaatataacgtaaatattataaacggtacgatgatcggagacggcggttccgtcggaattacgtcccctaacagtcaggccgtcattctcggggtgcaagcggaaggttacagcgcggccgcatctataaaaggacagacttatgatcagatccccgtcaatttaaagggaggcgcacagctcgcgaccagctccggttttgcattcaacccgacaagcgccgttattgcgggaacaggcgatattacggcaagaggtgacagaaatgcgatcatcagctcttccggaggttcaagttctgaaggttcaagggcatttatcgccgcttcaaacaatgtccatattacgggcagcaaagtctccagaacgattctgtcatcagaaagcattacattggaagaaccatacacggttgccggagggcatcagtccatcaaatggaaactcgattcagcgggcggccacggtacgttcgccggagctgtcacctcttccctgtcagggtacggagaatactttgaaagtgtaaccggccagacaattcccgccgggacaatcgtcacagtgaaaggcgaaaaaattgaatcggctcacgtcggtgattacatgctcggcgtcatttcagaaacagccgcttttatctcaggagccgcaagcttcggatggcaaagccgctttttgacaaacgagttcggcggtttcatttacgaaaatgtgactgacgaggaaacaggagaaacggtacgcgtgccgaaacaaaacccggactgcagtccggctcttgaagctgactatgaagcacgagcggccagagacgaatggcacattgtcggactcaacggccggcattacgtacgggtcgacagtacggtcagcccgggagattatatcacggctcataacggaatcgggactaaagccgcggaaggctggaaggtattgaaactgacagccttatacagtgctgaaaaagggtacggcattgcaattgcggttatcaaatagggtctcaatatcaggatcatctcctctcttttctatcgggcgggtatgatcctgttttttataccgaatgagatgcctctttttcagcataccgtttcatttgtccaagccatccatgctttctgtcatagaatactaccgtcagatgaaaaaaggaggaatatgagtatggatatgggtatgggaatggatatggatatgaacggacattatgatcaccacccaaaacagcctaaacaaaaaaagaagaaacaagataaaaagcatcttgattatgattacatcgttgtttataaaagaaaatgcaaaaaatgtaaaaaatgctgctaacttgacatatcaacatttttacacccggtaaactccgggtgtttttcttattatggcgtttctccgggctattttcacccaaaatccggtcatcctatcacaatacataaaaagactctattattttcttcccttttcgcctaatgaaaagtatttcatttacagaaaacaacacaaatagaatgacatgacttttgagaaaatctactctttgcttggtcaatttttctgcgataccatgaatttgcaacaatttttaaaaatttcctcaggaggtcattgccatgaaaatcgccagaacgatagtcggatcatgcttagctttatctctaacaattcctttcacagccagtgcctcagcagccagtcagtctgaacacgcaaacgcgcctcacgtttcacccgttgcaaatccgttagaaagtaaattatcccaaacagcagaccaaaacgtaaaagcagcaggtgttgatgccgggctgaacgtaaacgtagatgttctcggaatctcagatcgcattgctgaagcggttaagtcagatcaaaaccgaaccggctgggtaaaaaatgtcatggaaacaacattttacgcatcaggacagaagtacaatgtcatggtgttcaatttaaatcaagaatatgaagaccggtttaacggcgttcaattttacggatcagccgtttatgacggtattacttacggaatctgggtcttcgaagacgggtccttcgataacaaaggagacgggggctggatcaattgggcattcagagggtggttcgatcgtgataatcagcatattgaattccacagaccttaatacggtgaaaacttgcggcagcgcccgcaagtttttttaactggactgcacatttttcaccgttataacgactatacttgaagtgcgggctccgatcgcagccccggtaaagtctttcaaagtgaggtataccatgtcaaagtctttaaaaatagtgttgtggagcatattggtgttgatcatcttgttagtgattatcggaatcgtttcttacaatcaaactccgtctgcagaaagcatagcaaaaagaatgctttacagcgtctaatcaatgttaagccttcatcggctttttttatttaccgcagaacacttgacaaaacgacgaattttcaatttattcgttaacgatctcattcagtatagaatatacacgtgtatcatggggcagtccgttttgatacatatatcttctcaaaattccttcagattgaaatcccgcctttatcagtaattgatgagacgctgcattctcaatgaaaacaacagcgcctatacgatgcagcccaagcttttcaaacccaaaagaaagaacattctccaacgcttcaaaagcatagccattcctccaataattcggatgaatctcataaccgacctccgcccgcttatgcttgggcacccaagaattaaaaccaatagttccgattattcccttcgcatcttttctctcgattccccatcgcattccctttttatcatgatattgatctttaaaccagccaatcattttttcagcctgttccattgaatcaaaaggttccaaaccataatagcgtgttacatttgcatttgaaaaacaagcaaatatttgctttgcatctttcttttcaacttctctaagaataagtctgtccgtttctattacaggaagcatttacggtccccctttaaaagcaatgtgagaagaaaatatatgcagactaaaaaaactttttttcaaaaagtaaactagcatccctatcaaacttttcatttcggcataatatgtattaatcctctttaggaggtgagattatatgggattctcaggtggttatggtagctcctttgcgttaatcgtggtgctattcattttattaatcatcgttggggcttctttcctcggcgattattaagaatcctcttacctccgcatccatgtcagcagcacctccatgatcgtacggcgccataaatgaaatgtttatggcgctctgctgtttttccccttttcattcacacattaaaattaaaaagatcggccgatgtatcaacatgcagccgatcagtaattcatagattattgtgtaaggtttacatcgatgacgttatagaaggcattggaagtatccgcaacgtcccatacccctaaaatgacatgatacccgcttcgatcagtcggcacaaaaatcttatgagtcagattcgtatctgccttggaaccgtcgtggtttaccgttccgattaattcgaattcatctcttgacaaaggtttattcggattccagtttttcttggtgatataatagtgccactttgatgtcgcatgaggggccgtgtagtaccaagtaaaggtgttaaaaccgccgcggatgttttgtttcacccaataatctgcagtctgcttgtctaaaccgaagtcaatttgtcccgatcccccatttgcagacgcgattcttccatccggcggacctgcagccggaaatcctttcggcccttctacagactgaggattatcaatgacggagccatatttctgcgcagcggccgtccagcccaatgtttgtttctctaatgctcccatgtacgctctgctgacgggctcttttatatacccgtgtgcagatgcatcacttgaatagaaagcgcctccaataccaagagtaacagttaaaactgcagcttttactaaacctttcattactgcatcatcctccctcttttgttaataaaaacccttcagtgtatacacttcacgatggaggatgaaatgaccttcctttccttgataggaaaaagcaatgagattggcgcttttccctttgttttttataatcataaagaaaaagccgggccgattctgttatcgaatccgcggttgaccggcccgccccttttgctcagaacttcattcgctggatttgccggtttcctttcggataaccggtgctacttccgctgctaatcgttcgatgttttccgcggcttttttaaacggcatacctcctatatcgatttgcgcgagaaatcgctgatgtctgaataactcgtattgatgcatgattttttcaatgatctgctgtgagcttcccacaaataaagctgtttcttttccggacgcccgctcaaaatcttccttcgttaaaggctcatcgatcccgtgatatgaatgaacgtgagaccagtaatttgaatgatacgggtaaaattcttgtattgcctgttcattcgtttttgaaatgaacatatgtccggttacggcaaccttcacattttccggaggatgaccggctttagaagccgcttcccggtatttgtcaacaagcggcttagatgacatcggatcaccgctcagtacagctaatgccaaccccgcacctgcacgcccggcccgttctgcgctttccggagtccccgaaacacctaaccatagcggaatgcttccgcgaaaaggccgcggagaaatctctgcctcgcgcagcggcggccggtaacgtcctttccaggtaaccgattcttccccggaatttaattttaaaaaaaggtcaatgtgttcttcaaaaagttctttataatggcctacgtcataaccgaaaagaggaaacgagtctaaaaatgcgccccgtcccgcaatgatttccgcccggccgtctgaaatcagatcaagcgttgcaaaatcctcaaataaacggacgggatctgcggtggataatacagtcgtggcactggtcagcttaatattttcagtgatctgtgaaatcgctgataagatggccggcggcgaagataccgcataatcaagacgatgatgctcgcctacaccgaatacatcaagccctgcgtcgtcagccagtttcgccagcttcatcaattcatctatccgctgctttgcgctgactgttttccctgtcagaggatcgggatataattctgcaaatgaataaattccaatttccatacaatcacggtgttcagccctcacatgtctctcctcctgcactgtgtaaaaaagcttttatgttattctattcagccgttttacaaataggaattcgttcaaaataaatacagaagcttaacatgcagaaggtcggtatgagagaaaaaaaagtttcaggcgtccttcaattctgcccattatactcatgcagccggactaggcaagaacaaagccggcacaagcggattcgaattcatgtgttcattttcagtccaattcaatccaatcgtgatattgatcataaagctttcgtattcttccggcatcaagagcaatgacttcacaccctctgtcatcatacagaaagaaaataatatcttttgtcatattcacaaagaaaacatcaggatacccaacggaacagcccccgaaccttggcttcagcggaaaatcttcgtggacggctgccttaagtaattgggggatacgcagatttttccgtttacataataaagaaaactgctgtatttcatattcttcttcgaccgggcatggacaggtcttcacttgaatccgatataaatcatccttacacttcagaaacggctgataaacctttaattttctcgcgtgattaccttgagatttgtgcttatacacgttggcaacaagaaataagtcatcgctatgttcaaacagctcattgaaaagcgcggcggtttggtgatgaacaagctgaaaatactcaagattcaaagcaccgctttcattaaattgatacatattgccgccgagagaaaaatgaattcccacgtcccattgatgataaatgccgggcactaattttaaagtcggaaacctttccttcagataatcatttattttcattcaaacatctcactttccttttcccgctccagaggcagaagaagccgaaaacattccgcttatttctttttcacccttgtaatattattccgattggaatacaatgaaatagaacactgtgaaccccattgatcagggtggatgctggtcacattcatcctgattctttcttttacacaagatcgccccaactttgaacccctccgtttccaaccttattcattgatattacatatatttcaatggtattattttcttatgcataagcatcaagaggtgtccgctttgaacaacatcagaagtttaagagaatatttccggtctcactgtaaaataggtctaaactctgaacagcttttaacattttgagtatcaaccatttttccattctcgagcgcatcttataattcatcaaaatgaattgaacattgctgattcgaattacttcccgctccttctgtcgctaaactgcaaaatgtccatcccattcatcctctctccaattttacaacgttgctataatgaatttcatgttttccccaaccttcagcttaatctttttgatcgttactaatctaagtacttttttcaattccataatccattggtatgatcggtaacctaatgaagtatttaacttaaatacaaaaaaacctgctttcagcaagtttttttcgacaaaggggaggttatctccccacaaattctattaactatgtttttgttttaaccattctttctttagcaatgcgtattggaaagtgttttcatatttaggtgttccatcctcgtgtgcagtaaatgaaataaattcaagaaaataaccttctttacgtattcctaatctgtgacctgcagttatcatcttcaacatatgcataaagagatactcaaagaaagccttcgcactttcacttgcgtatcccttcccttcaaaacgggcattgaaattccaacaaacggaataggtatctggctcttcttttaaataaaatagttctccaacttgatcattactgtcttttaaacaaactgcaatataagagtcatctcggcttcttttttgaacgtttacggcagcttcttctaacgtagacattctgtcatcaagaaagcaattcactctcggatgtgcagaatattccaacagaccttgcgcatctctctcggtaaaatttcttaaaattaagcgaagggtttcaattttttgcatttgcagtctcctgtttcattgttatcgatctttgaaaagaacttcttcgtttgttgaagaacttgtctcaatctatttttactataatgatggacgttatcatctttgtcaaaaacaataatcattcttttgccgcccgcgatgaaaagtactgaacaattttcgtgaaaaaccctcagtatcgaatatagaaacgaggaatagtaataaaacaaagttaagccattacaagcttattgagttttttttcaaacttattcacgctcatcatctcatgagtgagaaatgtcccattataaaacacgctgaaagtcgtccaaactgccggggatttttgcgccatatcttttgacgttattcgccgggcctgaaaatgaagtcctttcttttcagtcagttcctttaaatcctttaacaatccgactgcaaatgagcattgggctgtataaaatattgtgattccctcatcattaacgaaattacttttcacctgttttttaaatacaggaggatgtgcatgttcattccacgtcagtgacatcaactgaaaatagggttctgcttcatcttgcacagcaaatcccatatgttcaaagaaatgcttatcacttaaataagggagctttttcttccccactatatgaactatcccatccataccgcgggattttgcatctgacacacatttttctaacaagtgtttcgcatgtccgttattcttatatttacctgagacccaaagacaattaataaacataaaatgaggtgcgcttaccggaacccacgcttcttctgcaggtaaatattcaataaaaacttttgcccgttcgtttaggcgatagaacaccaagccatcaatcatccgatctttgagccagctcttcttttcatttaccgcatcctcatattgtttcgtacctaatgcacagcaaatatgattgtcatcaatattgtccctagtcaactcaatgtactccatttttcctcacccgctttcttttggaaacatcagctttacttgcagtgaacattgtaatttctcagaaatatagagtcccagaaccaatatatgaacgcagcaacaatgctcattatgtaataaatgggcattctgaaaactgtgaaatcaattggcggattatctatgtaccagaacaagaacacagctaaaaaagcgactgctgtataaatgaaaagatgaaccaaactaaactttttaggcttctttcttaaccatagttgcacaggaacagcaaacaaaaagtaaataataaatgcgtaaaaagcaatgataactacagtaaccaatgcaaatggcacaaaacccgagtatacaaacatatatagcccgaagatcaaaccatacgacaaacttgaaaaagccaatgtgtaagtatagctttgacttttgctccaagacgccgctcccatatatttcacctgctttttataaaaatacatttctcatttttttcctattgtttaaaatcagtatatatccatcactttaaaagatctatgtttttttggcagatcatcaattcactatcttaatatccagaaattttattgccattaaaaaaggtcaaggaaataccttgactgtgtatcgctcaccaatctgcatccggctcatcgtgttcgaatccgtaaaagcctttaatccacacatctccgcagccggctccttttgtgatcaataagtaatgatttctgtttgcatcaccattcaccttatcagccgcgctcaagtccaaatgattacccgtgaaattcttttcactaagggtaaaattatctcctgccagtgtaattctctgcagtttaagctcaaatatcgacagaaagattacgaccacaaattcaaagcaagaaacgacagcccccatgcggatagaccaaacattacaaagaacctaagcaaagcttcgaattttgtaagtcttcgctcccttttcgttttacccaatttccaataaacggcgtagcaggaaaacaccaaaatgagttgtccaagtcgcgacacagattctaagaattctataccattcattgattttcacctcgtttatttaaacagagagtccttcttacagcgtttatccaaagcactaatttcttcggttataaaaaccgcttgaggaatttgtttgtaaaatggtttgcgtttgataaaaacagcccatccttactcccccatgaatcaatcaagatgaattttattatctcagatggaaagatgatttccaacagttatgtaaaaataagtaacttcaatatgctaattgtataagaaaagttgtcttatccagcagaaccatgagtgctgcgtttcccattaaagcgtcaaagaagcatcataaaagagccgcttttaggctcattcgcgaagcatcattttatttttatgattgtatcctcctgtcaatcctattgggataaaatttgagggaaggtcagttttaatccgccgccctgctcaccttcgacccttcttgcagcttccccacaaatatccgatgaacagcttttaactcttccctttgcgaatccctgaccgaaatctgactctcaaaacttatctgaccttgcatcgtggggcgccaattctcatgcatcaatttaattcaggatattcgcattttgcttttcgtccgatgaacgtgtgatttccaagataacaagggccataaatgagagtatcatgtccgacacttacattgtttccgatataaatggaatatgccttatctttgattgaaacaaattgttttaacaaatcatgtaaaatgactccctcttgaagatttgtatttgaaccaatcgcacgaatagcagcatttggcgctacttaaactcacgtctcctttcacgctggaaaacggacttatgaacgaagttttatcgattttaaggtatctttgaacccgattaaatgatgtaacagggttagggctgataaagggcaaaaagttagtgagccggtgattgtcaaatttatcttccgtcagctttttatcgctcaaaaaaagcctcctttgaaaacgcatctatttatgtatatatgtaaattctgtgcatttggagatgacacataatatccatataagcctccctgcatagctccctcaacttttgtagagacacttgtccgcaaaaaatgtaagggttttcaaaaggagagcagtgtgctaaattgtaagataagtaaaaattttctgctaatattcgaaaggggtgcatgatttgaaagcagtagtagcaacaaaagacaaaagtatagcgatcgtacaaaaagaattacgtcctttgcgacatggtgaagccaaagttaagatggaatactgtggtgtatgtcatactgacttgcatgttaaaaatgctgatttcggggatgttacaggcgtcactttaggtcatgagggaataggcattgtaactgagattggtgaaggcgtaacaagcctgaaaaaaggtgaccgcgtctctattgcctggatgtttgaaagctgcggctgctgtgaatattgcttaactggccgtgaaaccttgtgccgggatgtaaaaaatgccggctatacagttgacggcgcaatggctgaagaagcaatcgtagcggttgattatgcaataaaggtgccggaaaatttagaccctgcagcagcaagcagcattacttgtgcaggtgtaacaacttataaagccgttaaagttagtgaaattaagccaggtcaatggatcggtgtatttggagtcggcggtttaggaaacttggctgttcaatatgcaaaaaatgtctttaacgctaaagtgattgcgttcgacattagcgacgaaaaattgaattttgttaagagcttaggcgctgatgcggttgtaaacagtttaaacgaagaccccgtcgctaaggcaaaagaagtgactaacgatttagggcttgatgctgtggtcatcacagctgtctctaaaacccctttcaatcaagcgattgatgttgtaaaagcaggagctcgcgtagtcgctgtcggtttaccggtggacaaaatggatttagatattccccgtctcgtgttagatggcattcaggtagtaggttcattagtaggtaccagagaagacctgaaggaagcttttcaatttgctgcagacggtaaagttgtacctaaagtgacaaaacgcccgatcgaagatgtgaatgatatttttgaagaaatggagcaaggtaaagtgaccggccgcatggttatcgattttacttcctaatcattaaggctgccgggaatgatacggcagcctttgatctcgattcttgctcggcgccccacccagactgaatgagactttgtcatttagttcagaaaagaaactttacaaaccattcggcggttatttattttgcaagtactgcctgaactaaccctgataccaatataatgccaggtcattcattgccgaagcgtagccctgctgtcttaacatagttgttatgctgccctgatgataagttccgtgattggcaacatggaataaaatttctgagtaagcagtttctctgtaacctaaccaagggttatttaagttcattttttgttctacatcggtttggctattcatccattcttcaaactgtgaagccagttcttcataagacgccgcaaattcatctgcagaatataaatgagccctttcagcataagccatagaaccttccaatgcttcctgcatgtctattcctttaagtacttgcagccacataacatccaccgcgcagatgtgactgaacgtttgagcaattgtaggatatgaactgtgaacctcttcatattcatcttcactgagtaatttgaggcctttttcgaacttctctaatttaatctacataatagttcactgaatctctcaacaattttagataaacatcttctttttatagagatgttcgttcaatcgacatccttgtgatatttatggtaaaatttatagaaacaaaggagtgttgttacatatgagtcttatcattttagcatccatgcttttatggggtgcagtgatccacgagctaaacaaaccttcaaaaaagcaaagtaaacgaaaaatgatccctttggtatccctcagttctttatctactttaatcatcacaatttcgcttttttctaatttaattggttgatatttgttatgaggaaacccgccagaggttcctcataacactaaaaacctactcactgcactttttacagcagaccttatcagagtgtttgcttaacactttatccattctccccacaggcatcttcttctcactcggaagtgtaagataagctgttatctcatcccctgattttaatgtttttccgcagatagagcattttaactcagtattaaagaaattttttaatcccattcataagcctccttatttacctttataaagtaatacgttaatgctttataaaagtttcaggttaaagaaatactccttgcctgggaatatacttcgtttcagttgatccgcagccgccccggcatcgttatacccttgctcaatcaggaagcttcttccttatatcctccacgacattaaatgcggggaaaacgttcattcaggaattcagcgttaaccaaaaaggagaatacatcctgaaatatgatagcggcaccggtgatagtgtcgatggtttctttagagatctgttgagatctaaattccgttaggaaagtcggcagttttgccgactttcttttacaagcattctgcaggaataaacgtaaagttccgaataaacatacgacctttttgaaacggaaactttatctgcaccacaaacccgcaagcagcctccttgtatcgtaccttccgttcctttgtgatttgttttgatttgtcgtatactgcgcttgcccgggaaatgatgaatattttcgttaactataatttccctgtacctcttcgtatgtgactctgcatgatgaagtaacttcatgctcaccactttcatacacagttttattgcatgtttagccatatccctcctctttaaacagcaaaccgtcccatccatttctctctttcagttaacctcccattattttattgttttagaagctcttcattttagacataacatccattttttcttatttagacttaaatctatgtcgaaatttatcgtccggcatattatgtactatcctaacaacaggaggtggcaataatatggggaactacggtggaaattatggcggaaactctttcgtattgatcgttgtgctgttcattttgttaatcattgtaggtgctgcattccttttctagcacattgacgatttatattcgtctcccaaacattgcatcccttagttcggacagacgccataagaagttttatggcgtttttactttttaaaaaaaccaatctgagataaacattttttattttcactctggtaatctggtaagcgggagagtttccacccctgcctgcgcaaatattgccgctatgaagaatgaagcgaacaatccaatccggataaaaacttgttcatgaacaaaactcctaaatagttgttaaaaaactaaggcgtttttaattcatcggattacagatgttgtgaacttaaaaaggatattactcacctttataaaattgtcatttgttagatttagtcactgaatcttttttgttgtttggtatcttagcggccttccacactcatttaaaaagggtccgcctacaaaattcggtgttcacacattaagtcattttcatataaaaaaaccggattcctcctctaagaggttccggcttttcttagtaaaatgcgggaatatctggtgacgtgctgcacacccccgctattataatatttcaatagagccttctgttccatgaacgcgtattcgctgcccatcttttatcaattgggttgcattttcaactccgacaactgcaggtaagccgtattcacgcgcgataaccgctccgtgggtcatcagtccgccaacttcagtgaccaggccttttatggatacaaacaatggtgtccagctgggatcagtataggaggtaactaatatatccccatcttccaaatcggcatcttccatgtttaaaataacccgtgcccgcccctctatgactcccgaggaaacaggcagccctgcaatcgctccggccgggagattttctcgtttgtactcgcctgtaacgatttcaccgtcagacgtgataacacgcggcggagctagtttttcatatactttatactcgccttttcgtgtgctgatgatttggtaatccaatttatgtgtgcgtacgacttcctgaagttcttcaaaagtgagatagtatatgtcttctttttcatgaataacgctcgcatctgcgagttgttcggcttctttcagtaaagcctgcttataaaggaagtagcggctgatcatgccgtattttggatattctctgaacccgctgaagttccggatgatgcggatcattcgtttagtgtctttggctttttgttcaccatccggtaattgcttcaatcggtctaataactcttgttctttcttcaacgcctcctgccgcccttgctcaaatttccgctggctggcatttggctcaaagtttttgagattattaagaatcatagggacaagtgcagttggcttttcgctccatcgagttcttgtcatatcaatttctccggcacatcgcattccgtacttgctgagataagcatagatagcgtcacgggtttcccgcccgccttcaaacgtcaccagcccatccaaaaagtgatcatcttttacattctctaaataggcaatgacttctgggtaagggcggatcacatcggcgacgtccaatagcgcaagccccatttctgaagtaatattatggggtacagattgagaaagcgtatctgctgcgtttttttcacctaaccactcgttcattttttcgttaatccatgatgaagcatccattgcagttcgaatcaacaccgaactttttgggttaaatagaatcttctttaattccttgatatcttccaaaataaaacgaaataaatcatctcctgatttcgtctggatgttttgttttaactcttctatcgatgcttgactgctcttaatcaaatcagaaacaattgccggatcgttttcagcttgttccggcatatctgcattgcctttgccgggaatcggtgccgttttatcaggtatcggcttaatgaaatcatctcgctctattatggtcataagtgcgtcttttaagagcggatcgtgctgccccatgccttttaagaaaacttctctgacagtaggagatgccaattgatgtgtgacatcaacgaatagccttccgccggctttacgcataggtgcagcagtcgtcaacagaaaaaaagacaatccaaggggttttatgggatccgtcatcatttgctgatgaccaacagagatatagacgtgattttcttgatcgttcgcttcaggaacggggtataacgttgtgatcggccggctttggacaatataaaaagtatcgcggtccaaacaccattcgatatcttgcggctggccgaaatgagcttcgatctgtctcccgatacgtgccagctgtaaaatttgttcatcagtcagtgtttgaatcttttgctgatcaagagcgatctcctgtgtttctgttccgccttcttttcgtccatagatagccaattttttagtttctattctcttatcgacgatttgcccgtcctgtactttataacaatcggcagagactaagccggagaccagtgcttcaccaagtccaaaaccggcatcgatggatagcagctttcggtttccggtcatcggatcagcggtaaataaaattcccgaagcctgtgggaacaccatcctttggatgataacggataaataaacttggctgtgatcaaatccattttgcatacggtaaatgaccgcgcgatccgtaaatagggacgcccaacatttactgatatgctgcaagatcgcatcgacgccggtaatatttaaataggtgtcttgttgaccggcaaaagaggcatgcggtaaatcctcagctgtcgcactggaacgtacggcataggcatgttcttcgccgaaccgggagagttgataagcaactgctttgactacatctgaaggaatttctgtttccataatggtttgccggatttttttgctgacttcaccaatttgattccgattctccactttcagcatggtcagttgatccaacagcgcttgtaacgtttcgttttgttcaatggctttttgatatcctgcggttgtgacacaaaatccttccggtacttgtattccttgaatttttgataattcccctaaatgtaacccttttcctccaacgagcaaaggctgtgttttttcaatttcgtgaatgccgagaaccaaagaactcattctatatctccccttcaaaaaaatttgacaagagcttttcagcatgatataatcataatataagatggataactatgaattttcacacagaaagcacgcgtgttctgattatatcaccgtgtctgtttttgtgcaatataaaaagaacctggccaatttggcgaggttctttctttatttttgtctaaagctctttaaagctgtgttgagatcttttgtgtgaacgtaaatgttcttatacaactcgaatagtgttttatatttttgaacattttgttcttttggataaaatgcagctgcttcatgaatgaactgctctgcgcattcttcaagagagtcaaaccacccgcttccgaaggcagctaacatcgcagcccccatggcgggaccttgttcattctctaacttaaccaccctcgtattgaaaatatcagcctgcatttgaagccacgtttcatttttagctcccccgccaatagagacaaccgtatcaactgattttcccgcttcgcggaatagctcaattgattcatataaagagaatgtgatgccttccattatcgccctcaaaaagtgctctcttttatgggctccgtccattccgatcaagcttccccgaatagatgaatcagcatgcggcgttctttcaccgactaagtaaggagtgtacagcagtccatttgctcctatcggaacagattccactccctgcaataattgttcaaacgattcgttcggcgcaaacgttcttttaaaccagtccaagctgtaccctgcagcgagcgtgactcccatcgtataaaaagaatccttttttccatgattaaaaaagtgcactttccctttaaagtccctttctttgtcttcttcacaggaaagtatgactcctgacgtcccgatactgcataatgtttttccggaagaaagaataccggctccgacagcaccgcaagcattatctgctcccccggcgtacacttttgttttttccaacagcccagtctccgccgctacgctcggaagcagcgatcctacacagtcatgggattcaacaagcggaggacaaatttccgctgacataccaaattgattgcaaatctcctcgctccactctttgcgggtcatatgtaaaagtaacgttcccgccgcgtcggagtattcggtgtgaatggcgccagtcatgcggaatctcacatagtctttcggaagcaaaaaaacagcggttttgtgaaaaagttcaggctcatgtgccttcacccataacattttaggtaatgtaaacccttcaaggacacggttttttgtgatatcaagcagatgatcgccaaatgtctcggtaattctgctacattgaggcgtcgttctggtatcattccaaagaatcgcatgacgcagcacctgccgatcttgatcaagcagtactaacccatgcatttgtcctgaatagctaatcccgtcaatatccccgggttgaacgttggatatcgaaatcaattcagccaatgctgcaattgtttgctgcacccagtcttcaggattttgctcactatatcccgccttctcttggatgagcgggtaacttttggacgtttctgcacaaaccttgccgttttgattgactaaaatggttttaacggcacttgttccaaggtctattccaatgacatacttcattttttcactccttcctctctaaatagatccccattgaattggcccgccataacagtaacttcatgacgggcaattccgggaacttggctgcctgcatctttttacagcgggatctggagcttcttttttcacttgttatacctgtaaaatgtattggtttaatatcgcttttaaccgctcctgtctccctgattcgtttttaattggctgattgttcagcgcatattgctcaagtgttttaaaatcagctcttccttctgcaatttcaagaccaatcccttcagtaaagctgcggtaacggtgttgaatcacatcttcaaacacacgatcttcgattaatttgtgggcggctttcaaccctctcgcaaatgtatccatccctgcaacatgggcatatagtaaatcatcaggctcaaaagaagatctcctgacctttgcgtcaaagtttaatcctccgcttccaagaccgccattttgcagaatttcgtacattgctaatgtcgcagaatataaatctgtcggaaattcatctgtgtcccagcctaaaagcggatcaccctgattcgcgtcaacagagccaagcaagccatgcactctcgccattcgtaattcatgttcgaatgtatgtccggctaatgtggcatgattggcttcgagatttaatttaaaatgattgtctaagccatattgctttaaaaaggcaatggttgttgctgcgtccgtatcatattgatgggtggtcggctcttttggttttggttcaatcaaaaactgccctgtatacccgatttccttcgcataatccactgccatatgcataaatctggccatattatcaagctcaaattttaaatcggtatttaacaaagtttcgtacccttcacgtccgccccaaaatacatagttctcggcgccaagctcctttgctgtttctaatcctttttttacttgggctgcggcatacgcaaatacatctgcattacaagaagtcgccgcaccatggacgaaacggggattcgtaaacatgtttgcagtattccataatagcttaacgccgctggttctcatgtagtcttttatcatgtccacgattatatccagattttgatttgtctctattaacgtacttccttccggtgcgatatcccggtcatgaaaagcaaaaaatggcgcatccagtttttcaaacagctcaaacgctgcatctaccctcgctctcgccagatccatgcctttataatgatcccacggtctttgcatcgtagctgctccaaacatgtctgtgccgtcagcggtaaatgtatgccaataggcaatagaaaatcgcaaatgctctttcatcgtttttccgccaattacttcttgagaattatagtatttaaatgctaaaggattcgtggattctttcccttcgtaaatcactttgtttacgctttcaaaatagttgaccgaaccggaatgagagtgagccatgtgtgatttcccccttaaaaataaattctaaaatgatcattcaaatacaaatgcttttatgtcatgttgcacattagtttgttgcctaaacaaactaacttattttcatcttatataacctcatcagtattttcaatattttttttagttttttacgaacacattagatataataaaggttggattcgctatgtactgcgtttcgcacgataacacagaacgttcaacttaatttaaagattatacaaatggagtggatgaagtggatatcgctgatcaagcctttgtcaaaaaagttaaccaaaagttattactaaacgaaatacttaaaaattctcctatttcaagagcaaaattatctgaaatgaccggattaaataaatcaactgtttcgtcacaggtaaacacattaatgaaagaaaacctcgtatttgaaataggtcagggacaatcaagcggcggcagaagacctgtcatgcttgtttttaataaaaaagcaggatactccgtaggaatagatgttggcgtggattatgttaatggcattttaacagatcttgaagggacgatcgtccttgatcaacaccaccatttggaatgcaattctccagaaatcactaaagatattttaattgagatgattcatcactttattgcaaatatgccgcaatctccatacggtcttattggtatagggatatgcgcgcccgggctgattgacaaaaatcagaaaattgttttcgctccgaacgccaactggagagatattgacttaaaatctttcatccaaaagaagttcaatgtgcccgtttttattgaaaatgaggcaaatgccggcgcatatggagaaaaagtatttggtgcggcaaaaaatcacgataacattatttatgcaagtatcggtacaggaatagggatcggcgttatgatcaacaatcatttatatagaggggttggcggattctctggagaaatgggacatatgacaatagactttaagggtcctaaatgcagctgcggaaaccgaggctgctgggaattgtatgcttcagagaaggctttagtaacatctcttcagacgaaagagaaaaaagtgtccagccaagatatcatagacctcgcccatctgaatgatgttggaactttacaggcattacagaattttggtttctatttaggaataggcctgaccaatattttaaatacatttaatccgcaagccatcattttaagaaacagcatcattgaatcgcatcctatggttttacactcaattaaaagcgaagtgtcatcgagggtttattcccaactagacaatagctatgaattattaccatctatcttaggaaaaaatgcccctgctctaggaatgtcctctattgttattgatcattttctcgacatggttcataactgaaatgtacatacttctatgttttacgctcatctttaaagatgggtttttttattctaggcgtatttctgaatcaatactgacaaaggcaccttctaatatgaaaaaggagttctaaaatagaaatctcctttttcatgtgctaattatttttctttataacggaaatatctgaagtcggccggaatatgatgaccgctcgtatcttggcattgcatccctacaaaagctcctgtaaagaatcccccgccgcggatgtaatcatctgataattttttcgattctaatgcaatgtcgattttgtgccaatcttctttgttaaatgaatacaaataataatatttttcgttttcaatattcacttttaaatagacatacttgacttcacgaggaatcacaattttattttttaacggctgcgaaaaagaaaagttatcacatatcgttaattcaagaatacggccaagttcttcatcatacgtgacttgaagagccgtccaattctctgtattgtaatagttcaccaaaccagcagcttgctgaaaattttccggataaaacgcaacagccgtttccgcttcaaaatggagactttgccagcgtctggctgcaaatgcctgagtaaatgtcgaagttaaggattcatggccgtataatcgtaaatgatttggcacttgagttaatgatcctaatttctccgtaaacggaattcttaacgtttgaaaattaatatttaatgttgcatcctcaaattcatcaacttccggatacgtgtcttcaaacattgtttctggtatagaaggcgcatccacttccaagctcccttcttttccgccttctacataaggccagccatctttccaatagagcttttgaatagctgtttctctgcccagaggacaatatcctctctgctgaaaaattgaatcatcgtccggatgaatgggacgtcccgttaaatgagctaaataccactcgcctgtatgtgtttgtacaatggatgcatgtccgcatttttgcagcggattttccggcgcatgccatgacgttaagataggattatcaggatgaacttcatatggaccctcaatatttgcagagcgggcaattgtagcagcatgttcgaaccgcgttcctccttctgcggttaataaataataatagttcccgatatggtaaaggtgcggcgcttctgtcagctttctttcagttcctttaaaaatcacttttggtttaccgattagtttttgctccttatcagaatattcctgcatgacaatgcctccaaaggagtgccgatcaatacgctgatcccataacatatttaataaatattttttcccatccatatcatggaacaaagaagcatcaaatcccgagctgtttaatgtgatcggctccccccaatcaccattaatcgtgtcacaagtcactaaataattatgacaatctttccaggcgccatctacgaccttaacatccgtatagatcagccaaaactttccgtcactgtaacttaaacatggcgcccagaccccgcctgaattaggatttcctttcatgtctaattgcgatactctctgtaatggatgtgcaactaagtgccaattgactaaatcttttgagtggtgtatctggactcccggaaaccactcaaatgtagatacagcgatataataatcctctccaaccctgcaaatactcggatcggggttaaatcctttaagtactggattgataatcttcattttgaactcctcctcagctattttctgttgactcatcatgttttaagctttgaaatcgtcaatatgatccaaataaactttgtctctattctctaattctcgaaccatgcttttatattttttctcatctaagttatagaaattaatatcaatcatggccagaaccagtaagaacacggggataatggttgttgtaattaaaattcccgtcaatgcctccggcgtttgcacctgatttgccacatatccaaactgatctagaaccaaacccggtacaacccctcccaaggccatgccgaatttaaagaaaaatccgataatagcgtatatgagaccgcccattcttttcccggtcttatactctccatattctattgtttcaggaataagcgcccacatatatcccccggcagtgagacttccggcagcggccagcaatcgaaaggaaagtatcaggaatacattacttgacggaacgaaaagtaaagctaagaggccgatcatattcagtaataatgcatagtttagtaatttcttcttccctaataattgatgaagctttggaataaacggtaaaatgaccaaagcaggcaaacttcccaacaaaccgtaccacttcactaaatccgctctttctaaattatacgttacgtaatagatgccaaccgaattactgattgaattcactccaaaaataataataaagaaaatacttaatacaactagaggccgattaacacgaaattgctcaaatatatccgaaaatttaattttttcttccgatttttgaagcgtgacacgctcttttgtgcttttaaaacaaaagattaaaaggcacccgcctataactcccataatacccatggttagctgccagccaagagattcgctgccggaattatcgcttaaataagcagccagtaagggaacaaaaaatgcaacgacaagtcctccaagatttgcaaataacatacggacagacgttatactaacaacttcttgattatttctggtcattgcagatgttaacgcgccatatggcacgtttatcatggtatatgtaagcgataagccgacataggtgatataggcatatattaatttccccaaatccgaaaaatccggggttgtaaaacagagtatggccaatatgacaaagggaaaagctccgaataaaagatacggtctgaagcggccaaacctgctatttgttctgtcaactattgttccgataaaaggatcagcgagagcgtcgatgattctaaccactaaaaacatcgtaccggctgctgctgccgataaaccaaaaacatctgtatagaagaacaaaagatacgtagacactgttgcataaattaaattacatgcaaaatctccagacgcatatccaactttttcaaccatgctgatcttctttacattttcactgagcatgatttctccccttttcgatcctttacataaggaacatgatgaatggtataacattttatttaaaattatcggccagtgagcggtgtataaaagcgctttcaaagaatgatagcggtttactttcacagagcattttcaacatccaaatggtgatcagatagcagtgaacaggataaaagcttggctttcgctttttatatacctccaattaaatcgagcctcttatccccctcccatttaagacctttacatgatggacaattaaagtggttttattagtttgttgatcgaacaaactaacttgatttcatattataaaatcttttctgctttttcaactcttttttcagagaatttaaaaccggcaaaggacataccatgttgtaattgccgactgcttcgacagacgttaagtaaaaacccccctgtgtcacctgactgacttattaaatgaaaagaacttccatcatcttttgtttagaaaaacttattaagaaacgtgcactagaaaaaatgcgaatcatatataagtgatatcccgtttaattggttgaggaggatattatgaaacctatgctgccttttgaaaaatattttggggatttagaactggtttatacattttatggagctatgcctaccggtgttactgtttcagaaactggtcgtattttcatttgttttccgaaatggggagacaatgttaaatttacggtggcggaaataattagggataaattacagccttatcctgatttacaaaccaatttggttaaccctgagaatatcaaaatgactttcatcagtgtccaaagtgtagttactgatggaagaggaacgctttgggtattagatacggcggcacccaatttttctgaaccaattaaaggcggggcaaaattagtcgctgttgatttaaaaaccaatacaatcagaagagtttatacctttacagaagatgttgtccttccaacaacttacctgaatgatgtccgatttgattttcgtgttggaactgcaggttatgcctatataacggattcttcttccaaaggaccaggagctattatcgtcgtggatttagaaaccggaaacgcatttagacggttaaatggagcaaatccaacttcaccggattcctcttttataccgaaagtagaaggcaaaattttgatgaatcgtaatagggatggttcaacttccccatttaggctggcatccgacggtattgcgatttctcctgacggaaaggtattatttttttgtccactgaccagccgccatttgttctcgatctcaacagaagccctgagagatagaaatataccggacatggatttactttatcatgtggcgtattggggagaaaaaggcgcgtctgatggaatgattacagatgcgaaaggagccatttatgccggagattacgagaacaatagtattcgaaaaatgctgccgaatggcacaatggaaaccatcgcacatgattcgagaattttatggccggatactttttcgattggtccggatgaatacttatatgtcatcgtgaaccaattacatcggcaggctagatttcattatggaaaagacttacgacagaaaccttatagtttacttcgtatcaaaattgatgaatttcctgctccttcctattgaaaataaaaaatgaaggaaatcatataatatcctcatttaaatataaatgattattcgagccgtttataatcggcctattgacgtatataagaaaaaaacagacctcccttgagcctcagaacctgaaggaaaaggtctatcatgaatatcagctgagcaagtcctttgatgggcagcttttattacagagccggggtgataccaacaccctggtctttttattaagggaaaaacactgtaacccgtctgtagtttacagcaggaaaaagactttatctggatgactttattcatgatcccaaaacaatatcttttcattatcgatatccatacatatttcattcccgcctgcagagctgcttgcaataggaattatatttctaggaaaccgatcagaatatgtatcgatcactttctgaagactgctatgatcgttcgctaaaccgtaaatatcctctaacaattgcgtatcatcgtccttacccatccaaaggtctttctctattggtttatagcaaacgtcatactcaacttcatctgttgtttttttactttctaaataacatcctccatatatcttcaaaaagtccttataatctgaaggtaattgattgcctatgttaatttcaagctcttttagttgttcatttgtattaatgctaggatctgtgccagcatcaatcgtaaactctttcaacttttgttcgatcttatcttagtaaagctcattttaatactccttcatatgctatggaaaaacaagttatagaccttctttttagttttaatcgtcccagtcctcatcatcaatccagtcgtctttcgcttcttccagttcttctattaaaaactcaaggaatgtactaccaacttgtttaccatatccctcttggttgtcccatagaatgacagggcattcaccatttttcatcttattagtgtcaagacaataagaaaattcatctacatattcgatcactacaagaccatcggaaaggttataatattttttatattcattggtctgttcgacaacttcagcgccgtgagagtcatatccgagtatcattgttccatatgctccccctgaaccatactcagttaaaaaccacttatagctgtctggaagagttacattgagatcctcttctatttctctaatctgctcctcagtgactcctcccgtgagaattgaattttctttattttcatcaaagaaagtttttatttttgaataatccattaaactttcacctcttattcttggttctcaaattgctgagctctccatctccaataccttcttctgaaacttttatattgtttatcaagtactagatcatttctaaaactctgtccattcccttttaatccatgcaaaacatcactgtacttattatgccagctttcaggtatctccagtatagtaccaggctcttcttgaattaagtgatgtaaatttatttgcgtgccatctttagcaaacggagcattaccatttttcatcagttgtagattcgtaaggcctttacgatttttttgattaagatcaatatctttcattgtatatactctacggcttacatctctaggctctcctttaacttttaccttaccgtctatttcgtatgcttcatatttttctttatttaaccaagggacatcaacttgctgacctgtaaatggctttctgctttcatccaatttctttgcattggtcaaaagttcatttttaaggttttggctatcaaccacattgtatggcacgtcccctgccatcgcaagattatatttagagttatacggaagcagatctggaagtttaacatccttaattttctgacctacctgtcctgccttgtttatgaccttccccgccgcatcagctttgttaacggctcctgctcctttcgttccgacgacagccacagccactgaaccgaccgcatatgtcacccatctagatctggagtaagcatctccgttcaccatatccttttgatacgattcttctattgctgctgaaacagcatcatatgttttaacaggatgaagtactgcattccccagtgctgacaaggtttctcccggatcggttatgaagtcccataaaccggttaccgtgtctttcccaacatcatataaaccaacgccggctccttttaaaatatcccaagtcacttctccggcttcttccagctgttttgcttgttcaagctgcatgacatgttgctgctgggaaggttcaaggttttcatagccgatcttcttcgcaatttccaaatattcatccggatcggtcacaccgtcagcgagttttttcttcaaatccttgatttcccgctctttcgcttcttccttcttaattgtcaggtaagcgtctgagtgtcttgcaatctcgccttttttcttatgtatgtcactttctctgtacgcctcggcattatagtgaagcggagtggcgtttttcccttttcccgtagcgttttggagctgttgaaaatcggcctgaatgaaatgttcgtttgcctcggtttctgcgtattctttcgttagatcgtgatcgagctttccgagcctatttacggtatcgtcccgttttttgtctgctgattccagattttgatcgacatcttctgtagagaaaacatcaagatgaatgatatcgctgatttcatcacagtctgttctgactgtcatacacggttttatctcgttctgtaataattttcagcggtatagtatttccaatcccaaaaagcatccccgttcgacataatatatcggtctaaaaatatttcaaagtttaaatttaatggattatattctgaaccactttcaaatataaatagatagttaggatcaccttgattcactctatccttatcgatcattaaatgacattcttccaacagatagccaataggtattccattgatcccatcaaacaaatcctcatattttagttcttcctctatttcctcaaggctaaataaatgaagccctccgccaatattctcaccctttgaaaggatttcgaaaatttttgcgccattatgctgagaaataaacttcaggtaatcatcaggaagagtgaatttatgattcgactgaaagttttggatttcactaagagacgctttgttcggagaaaaagtcacaagactctctataatatatccctcagaacaaaacaatttaatggcccctttttcatctaaaagacttttcaaaccattgatagtcttatggacaaagttagtcaataaaaacacccccatactcctcagaataattactgaggatacgaatttgttaatcagtaagaattttattcataattgaagcagcattagaagtaaacaaaatataagtgttttttgccgttttaattactatcctatccgtagagccataaggaaacccaatccttactgcatttttctcctgtcccccatagtatggatccagtaatacatcgttgatttctttgattggaatttcaattttagatagttgccaattgataattaatttaccatcagatttttcaactttaatcccaagcaaaattgcatttccccttccgtctatatactaagttaaattgtaacatagggtttgcataaaataacatattaaggaaaatggaaatgattgcccacaattttcagataaggatgttgtgaaatcgttttagtgaaagctgtaaaaaaatattacgaaagaacgccttacctggcgtcttcagtttcaaagaggaggtggagggatggaagtctttagtcttgttcattttttcatttcaccagttctaccgtaccctgaaagccctattaaaggtctgtttcatttatgtcagaagagacagcatttttgctttagtttttggtcggacactccgtcagcagacaagccatatatacgtttcgcagttactgttttcagaacgcaacagccatcaattccgttgttagctgcccccatttttagaagccgtctactcaaaccaaaaccgaataaagaatcacgagaaatacgagtcatcaattgcggagttagattcataacttcaaatttttttggtcatattttggtcaaggaccaaaaatattgttcttttaatcttatgatcaaaaccaaaaaatcccctgacaccaatagtgccaagggattgagagattaatactgagacatgtattgttcgcgctcccacggatgaacctgtgtgcggaacatatcccattcgatttcttttgcttcgatgaagtgttcgaacaggtgctcgccgagtgctgcaaccatgacttcgtttgatttgaattcgtcgagagcttccgccagtgtcgccggaagatctacgatgccgttttccatgcgctcttctttgctcatgacgtagatgttgcggtcaatcggagccggtgcttcaagtttgtttttgattccgtcaaggcctgctgcaagcaatacgcttaacgccaggtacgggtttgccgccgggtctacgctgcggacttcaacacgcgtgctgatgccgcgggaagccgggatacggatcagcgggcttctgttttgcgcgctccatgccacgtagcaaggtgcttcatagcccggaacaaggcgtttgtaagagttcactgtcgggtttgtgacagccgtaaagcttgtcgcgtgttttacgataccggcaatgaaatgttttgctgtttcactcagctgaagatcagcgtctttatcaaagaacgcgttaacgctatctttaaagagtgataggttgcagtgcataccggaaccgtttacgccgaacagcggttttggcatgaatgtcgcatgcagaccgtgtttgcgggcgatcgttttgacaaccagtttgaaagtttggatgtcgtcacaagaacggatggcaccggcatatttaaaatcgatttcgtgctgacccggagcaacttcatggtgagatgcttcgatttcaaagcccatttcttcaagctcaagcacgatatcgcggcggcagttttctcccaagtcagtcggagccaggtcgaagtatccgcctttatcgttcaattcaagcgtcggttcgcctttttcatctaatttaaacaggaagaattcaggctcaggtccaagattgaaatcgctgaaaccgagttctttcatttctttcagaatccgtttgaggttgttacgcgggtcaccttcgaacggcgtgccgtccggattgtaaatgtcacagatgaagcgtgctactttacctttttcagccgtccatgggaagattacaaatgtgttcagatcagggtataagtacatatcagactcttcgatacggacgaaaccttcgatggaagaaccgtcgaacatgcatttattatcaagtgctttttcaagctggctcacaggaatttccacgtttttaatcgttccgagaatgtctgtgaattgaaggcggatatactttacgttttcctcgtttactaattttacgatgtcttctcttgtgtactttgccatttcgtaaaactcctcctctaaaaggtaaatgtatatagcaaaacagttgctaacggattaatgaaagaatcgggacatgtcaccttggcggaaagtatttccccgctggaaacggcctgcctgcatcagttcgtttttcagaagctttctgagttcgtcatcagacagattgtgcttcatcggtttggcggttttttcggatttttcttccggttcggcagatgccttatccagaatttgtttgatccccgccatattgacgccttgttcaatcagatttttgatttctaacagtttatctacatcatggaatgaaaataatcgtctatttccttcgcttctcgctggaaatatcaatccattttcctcataatatcgaatttgccgggcagaaagttctgttaactgcatgacaatcccaattggaaataaaggcattgagcggcgaatgttatcactcatctcaatttcctccttttcttatcttagtctcattataggtgatgttatattttgtgtcaacacaatgtaaggaatcttaacatcaaattctttgaaaattgcaaacggcctaaatcagctctttttccattaaagcatttacggcgctgcaaatcgcatttttcacgtgcgcgtaggttaatcctccttggacatacgcgacataaggcggtctgatgggtccatctgctgataattcaatgcttgctccctgtacgaaagtgcccgctgccataatgacatcgtcttcatatcccggcatatagctcggataaggcgtcacatgcgcattaatcggtgaagcatattgtatcgcctggcaaaaagcgatcatcttatcaggatcctgaaactcaactgattgaatcagatccgttctcggcgcattccatgcagggtttgacgtaaagccgagcttttcaagaaaacgggcggtaaataccgctcccttcaagctttgcgccactacatgcggagcgagaaagaaaccttgatacatttcctgcagtgaataaagcgaagcgccggcttcacttccgattcccggggaggtcatccggtaagagcaggcctcaatccacttggctttccctacaagatagccgcccgttttagcaaggccgccgcccgggtttttaatcagggaaccggccataagatccgctccgacgtggcagggttcccgctcttctgcaaattctccgtagcaattgtccacaaaaacaatgacatcttctttgatttccttaacgaaacgaatcatctcttcaatttcatttattctgaaagacggacgattcgcatatccttttgaacgctggatgccgatcacttttgtattcggccggattgcagcccggaccgcttcaaagtccactctgccttctgatgttaaatcgactgcattatatccgatttgaaattcctttagcgagcctgaatactccccgcctcttactccgacgatttcctcgagtgtatcgtaaggcttgcctgttatataaagcaattcgtccccgggtctcagcacaccgaagagcgcgattgaaatcgcatgcgttccggaaatgatttgcggccgcacgagtcccgcctctcctccgaacacatcagcatagatcttctccagtgtatctcgtccgatatcatcataaccgtatccggttgaaggcgtaaaatgcgtatcgcttactttatgttttctgtagctttgcaggactctccattcattccgttcactgatttcttctattcttttatgaacggcggagatttccgcttctgtttcttcggcggttttttgtaaaagagcgccatgggtcagtgtgtcaaacatgttgtgtataccttccttacatgaatttcttcaattctccgagtatgctttgttcttcctgtacataacctgagacttcgtagcgttcattttcttcattaaaataaaggctgtcgatcatggtctctgatttgatgcgtgacatcaatttgccttcggcggcaggcacatgaacttcatacggcgtcagcagctcccggcgcaaataagcttcgatttccgcttttagttttgcttcatccccggcgattctggcgctgatcatgatgtggccttctcccgctgtcgggatgaagtcaggaagtgtctcatcacgtttgttataggcggtcagcaccggaatatcatctgcctgaagctcttttaacagaccgaggaccgtctgttcatgcccggcataatcttcattggatgaatcaatgacatgaatgatcaagtctgcttccttcacttcctcaagcgttgagcggaaagccgcaatcagcgtcgtcggcaaatcctgaatgaagccgaccgtatcagacaaaaggacgctgtagccgcttgggagcgccatctttctcgtcatcggatcaagtgttgcaaacagcagatcttcttcatagctgtctgagcttgttaattgattgaaccatgttgattttccggcgttggtataaccgacgagtgcagcctgaagcacgccgttctttttacgtctctcccgataacggcttctgtggcggataaccgttgaaagctgcacgttaatttcgtgtatgcggtttctaatgtggcgccggtctgtttcaagctttgtctcaccgggccctctcgtcccgattccgccgccttgtcttgagagattgattccttgtccgcttagacggggcagcgcgtattgaagctgggccaattcgatctgaagctttccttctctcgtcttcgctctttttgcgaaaatatccaaaataagctgcgtgcggtcgatgatcttcgcttcaattgcagtggcgagtgatttaagctggctcggtgacagttcatcgttaaaaatgaccagatccgcttcaagctcttcacacagcgccttcagctcgtctactttccccttgcctatatatgtagcggcatccgctctgttccgtttttgcgtaatccgggtcagcaccgttccgtcagccgtttttgtcaatgaagcaagctcttccatggaatgttcaaagtgctcatctgtcatgtgcggaagctggcagccgaccaaaatgaccgtttctttttttccttcctgttcgttcaaatggatgttcctttctgtgtcgtattgggcagtagtactatcataccaaacccgcagggcgtataccacacatccggcgggttttaaagagagaaataaaaaagagacccctcaaaccggctgagaggtctattcgtgagctgccgcctcatcttttataagtaaatcctggctcttgatcgtcattaaatcgttttttaagtattggtctcccattaaaagtctcatggcctgagcgcggattgatttttcaatcacgtttctgacaaagcgcccgttgctgaatttaatggggcttgtcgtgcttttcactgtcattaagtaatcttttaacttccactcggcttcctggcttaattgatactcccgctctgctatcatgcgctttgcgatgtccatcagctgagtgacagagtaatccggaaaatcaatgctgatagggaaacgcgattgcaggccgggatttaatgacaggaaatgtgtcatttctctcgagtaccctgccaggatcagaataaattcatgctgtttgtcttccatatgcttgacaagcgtatcaatcgcctctttaccgaaatccttttctccgccccttgcaagtgagtatgcttcatcaatgaataaaatgcccccgagcgattttttaatcagatctctcgttttttgcgccgtgtgtccgatgtattcaccgaccagatcggcacgttccgcttcgatcagatgtcctttggaaagcacgttcatttcgaagaaaagcttgccgatcagtctcgcgacggtggttttcccggtgccggggttccctttgaacatcatatgaagagcttgttttccgactttcagcccttgttcggcccgtttttggttgacgaatatccacgcgtaaatttctttaatgttgcgtttcatttcttccatacccactaatgtgttcatttctttttcaatttctttcagaatgctgtgcttggcttcatttttttgcagggcggcctgatattccgcctcagcttccgcatttgtcagcacttgcttttggccattaagaatgatgttaatttgtccgttatttttataggttacagcgcgctccaacatgctcacctctctgttctctctttatcttactcatgatgaagcggttccgtgacatccgcctatcatcatgagacccgttttcctctttatctgtcactttttccgatctcttcgggaatgatgttgaatcttgcgctttcccgagaaatatttttcatttcttattgtattcagcagaaacgggaggacaaaccatttatttttattttccgggaaatgttgggtatatttctcatttttttcatgaatgacagccgtacaagcaccatttgaatatcatcatatgctgtaatgaggtgatggagaatggttaaaatttttatagaccccggtcatggcggaactgattcaggtgcaaccggaaacggacttcaggaaaaagcggtcacgctggagatcgcgctggctttgcgcacgattctgacgaatgagtatgaaggagtttctgtcacgatgagcaggacaagcgataagacagtcagcctgacggaaagaacggatgccgccaacagctggggcgcagattattatttatccattcatattaactcaggaggcggaaccgggttcgaaagctatatttaccccggtgttggagcgccgacctcgacttaccaatcagccgtccacacgcaagtgattcaagcatcgggttttaatgaccgaggaaaaaaaacagccaacttccatgtgctgcgggagacaagtatgccggcaattttgacggagaatggttttgttgatacgtcagctgatgcaaacaaactgaaaacagccagttttattgaaagccttgcaagaggacatgccaagggcttggagcaagctttcggtctaaaaaaaaaggctgacttatataaagtgcaaatcggcgcattcaaagtgaaagcaaatgctgatgcgcttgccgccgatgcggtgtctaaaggttttgacgcgattgtgcttccaaaaggcggcttatttaaagtgcagatcggcgcattctcttccaaagattacgctgaagcgttggccgcgcgggccgaaaaagccggatttgatgccttcattgtgcaaaactaaatgaaaaacccccgctctcccttttttggaacgaacgggggttttttgttattgaagtatatcggcgacaaactgagaccaagcttcaagacgctgatacacattttcctctttcagttcgctcagtttcatccagcgcccggcgatttgatctttttctttcacttcgacttgtgccgcagacgctaactggagcgcagaaaggatgccgatatgcaccttccctacatcgttttcatcatcattgatcaggccgagtgtgacaatgttttgtttgtcctcctcgcggatgtacagttcttccgccagctcccggtcggtattctgtttcagcacttccgtaaatgaagccgtcccttccatagggttcatgtgtccgccgaagccgagagaaagcttattatggaggcgcgattcccctccgccggcgagccgttcatacacaaacacctcatcatcgcggcggatgacgacatacggaatcggctgtttaaatcgcgggtcctcttccgcgtcgcctcttctgatttcaaaaaaatgcgcctcaatttgagccataatgtttacgatacgttcatcctcgctgttgactccctgaaatgtcagcatttcgttttgaaagacgtcactccgcggtgcagccaagatgatttcatccattttattcatgcccgttcctcctgtcttacctctccattcaagccaaaagagcagatattatatctgctcttcatcttggccaaaataaaaatcttcgtccttaatcggttctaccgtcgcctttttgtagccgttccctttcatggagaagaaatcatgtgattttgttttggtgtttaatccgtttaatacgatcggattaatatcctcttcttcaaagtaaggatcgaaccctaagttcatcaaagctttattggcgttatagcggatgaatttctttacatcgtgtgagagtccgacttgatcgtacaagtcctctgtatattcaagctcattttcatataactgattcagaaggtcaatcgcaaattcacgaagctctgcttttttctcttctgtctgtttattataaatttcctgagcaaggagaccgacatacacgccgtgaatcgcttcgtcacgaaggatcaggttaatgatctcaccgctttgcatcagttttccttgtccgtagaaatataacggataatagaaaccgctgtagaaaaggaagctttccagatagacggaagcaaccatcgctttgaacagtgaaatttcatcatctttttgaatggctttgtaaagcccgacaatcatttgcgcttttttctgcaaatatttattctgctttacccattcaaatacttcgttgatcgtttcagtcggagcaagcgtcataaaaatatttgaatatgattttgcgtgcaccgcgttttccatcatcgccatgaaattaagaaccgcttttcgctgatggccttcgacgtgctcggccacaatcggcatgcccgtgttcccctgctctgtatcaagcagtgtcaggccggcgagcaccttcatgtacgtatcctgctcatttttacccaaatacttccaagtgagaagatcgccgtttaatgcgatctcttccggaagccaaaactgctttacgttttggttgtaaaacatttgggtgaaatcatcttcatgctttgaccagtttgctgcgtcataaatttttgtcactgtaaactctcctttaatcaaacgacacaagaaagacagctgtcctgcccggtatctttcgttcttgcatagtaaatggttttgatgcctctatggtgggcatacagatcaatacggttcaggtcacgagttgtcatcgtatctttcaaaaacagggtaaagctgattccctgatcgatatgctgctggattgtcgcgatcatatccaccactttgaacatgtccatatcataagcttctttgtagaagaaccagttattagacgctaaccccggcatcgggtaatacgtttttgaatttccgtatgttctttcttcgatccgttccatgatcggcataacggacgccgtgctggattggacataggaaatggaacctgtcggtgcgatgcacagtctgtagctgtggtacatgccgttttcagcgacaaacgccttcagctctttccagtcttcgattgtcggaatgtgcatgccttcaaagagcgcagcgattttttcgtatgccggtgagaactctttttcgatgtatttattgaaatattctcccgttgcataagtggagccttcataatgctcaaacgtttcgcctttttctttcgcaagctcagctgaacgctgaatggaataaaagttcaccatcataaagaacgtattcgcgaaatctcttgcttccgggctttcatacgcgatgccgttttgggccaggtagccgtgaaggttcatggcgcctaaaccgatcgacttcatcgctttgttcgcgcgtctgactgccggcgcgttgcggatatccgtcgtctcagatacatgagtcagggaatccgtcgcgagtttcaccgtgcgctcaatcgatttatgtttcatgacattcaaaatatttaatgaaccaaggttgcaggaaatgtccaagccgatttcgtcttcctcgtcataatctgtgtaagccgaaacctgtgacgcctgaagcacttcagagcaaaggttcgagaatttcacttttgatacgtggttattcgcgtgctctttgtttacgttgtcctggaacataatgtacggataacctgactcggaacggagaacggcaagcttttcaagcaatttgcgcgcattcactttttcttttttgacacgcgggttgtcgacaagctcctcatacatcgccgtcatgtccatttcgtccatatgctggccgtattctttataaatcgtatgcggatagaatacataagccgctttatcctcacgcgcaagctcaacgaacttatccggaatgacgacaccgatagaaagcgttttgacgcgcacatcttcatctgcagaaatctttttcgtatcaagaaaatcattgatatcgcggtggaaaatatttaaatacgccgcgcctgagccttgtctttggcccatttggtcagcgtaacggaacgcattatcaagaagcttcatgacgcctacaacaccttttgtggcgttttcaacatctttaatcgcttcgcctttcgcgcgaagcttggacagattaagagaaaccccgccgcccaatttagacagctgcatggaaatatcgatcgcccgtgaaatatcgtttaaggaatcattgacttcgagcaagaagcagctcaccagttctccgcggcgttttctgccggcattcaaaaatgtcggtgtactcggctgatattcctggttgatcatcaggtttacatattcttttgctttctcagtgtcgccgtttgcgaagaacagcgcgacgattgagattcggtcctcataacgctcgaggattcttttcttgtcattcgttttcaaagcatagtcattataaaatttaaacgcactcatgaaggaaggaaaacgaaacttctttgcgtaagctgtcttaaacacttctttaatgtcttcaaaagagtaaaggcttaagaattcctcttcgtagtattggttttcaatcaaataatccagcttctcttttaaatcgtgaaagtaaactgtgttttgattgatatagtcaacaaaatagctatgtacagcctctttatctttatcaaactggaattttccatcttgttggatcatgatttcgttatttaactggatccattttggcacttgattttgtgacaactctttctacctcctgagtaaacaattcaacgtctttagatgtgccgctgagttcaaatttgtgcaagatcggcacctgatattgtcttgaaatggtatcggcgctttttgcaaagttatcgccccatactttgttgccgctcgcagcgactcctaataagagatgggcgtatttttcgagaaatgattgtgttgatgccggtacctgaccgaagtttgtcgtgtaggtgaccaaaacaaacggagtgtccacgtggttcgtttcgtccaccttgcggatcagctgaaagtctgttttattcacaaaacgctgaacattccctgtctttgaatcaaatatgatttgaaccatccttatcacgacctatcaaaaataatgaatctcttaacactatatatagtatactaacctctcagaaaaacacaacatattgagatcgatttataaaaaattcatatttttgaaagagcggactttggctctggcccgattaacgcccaaaaaagagagcagaacgagaatcatctctcatcctactcaaggtgtcatgtgtaagccgatgtctatcataacatgaaaaaaaactgcttagtagtctagacttttattcttattttttgtaagaatcacattttttttcgctttcaacggtttcttcaatctccacatcagcaccgatttctttcagtacggctttcagagcgcttgtgatggaagcctctctgatcagttctttgccgtcaacgatgatgctggttccatattcatagcaggaatcatcttcacaagtttcttcccaatggttgattatcaccttgtgtttcaatcgtctcaccctctgcatgatcaatgtcagtacttagtgtagcttgtgcggcccgctttgtaaattcgaacgcttgtgaaatttattcaagctcatccagcgccgtttcttttttcagttcgattttattcgttttttcatcatagcggtatatttttaagtaaccgtcctcgacgatgccgaaacgattatgttccagctgcaccatgccttctgtctgcggttcggtatccgccaagccgccgtcatcatccgtcaccaccgtctcatgattgctgcaagctccaaacagcaaaaaaacagcgatccaaacgagcgtaatcctgattcttctcagttcattttcactttcgaacacgattttccgaacccccttttatgtttccgatatacagcctgcaatatacagatgcgcatagaaaaagaccattgttcatggtctttttcaaaaagtctattcaagctcaagctggacgtttttttgcggggcgaacgtggagatggcatgtttataaataagctgctgcttcccctccgtttcgagcaaaacggtaaagttgtcaaagccttttacctggccgcgaagctggaagccgttgagtaaaaacaccgtgacgaacgtattgtcttttcggatttgattcaaaaactgatcttgaatattaatcggtttcatgtttcgtcctccttggttctcaatacaatactgtttcgattaaatttccagttttcctgctatgcactcgaaaatttccttttttttctgctcaatatcaacaggcggcgtcatatctgtccatgaaacgggcattttattgcgaaaccaggtcagctggcgtttcgcatatcgcctagaattttgttttaattgttccacagcctgagggagcggcacttttccatcaagatattcatacagctctttatagccgatcgcctgaatcgattggctgtcccggatattcatatcatacagccgctttacttcgtcaagaaggccggtttccagcatcaggtcaacgcgctcgttaatccggccgtacaacacttctctgtccattgtaagaccgataagaaccgcattgtaaagcagctcccgtttttgggttttaagatgctctgacattgtttttcccgatacatgcaagatttcgagcgcgcggatgactcttcgcgtattattttgatgaatggctgccgccgcttccgggtcggctgccgcaagcttggcatgaagcgcttccgccccttcttcagccgccaatttctccatgcgctcccggaatacagggtcgccggagttttccgtgaacgtatagtcatacagcacggactgaatgtacagacccgtccctccgacaatcatcggcagctttcctctatcggcaatctcggtgatttttcccctcaccattttttgataatccgccgttgaaaaagtgtcggacggctccaaaatatcaatcaggtgatgcggcacgccttctgtctcttcttcggtgactttggccgttccgatgtccatccctttatatacctgcatggaatctccgctgatgatttccgcattcagcattttcgcgagtccgatgcttagttttgtttttccgactgccgtcggtccgacaagtatgacgacaggctgttttttatttttcaatatgtatcactctcttttataaatctccccctaattatagcattcatttcttcaggcacctatccattttgccctttttcctgagcgctaaacgtccgctaccacccgatcggctcgtttccgacaacctctctcgtttttcctttgagcgtatggcggtgcgttttccgtccttcctcccgcggatcgtaaacgacgccgccgtgctggatctgaatcggctcattgtaggcggcaaaggtggtctctgaaagctcatggtaatgtgttccgtcaaccctcgggatggcagggccggaaatgccgtaatacctatgaaaatggccgttttcaaacgaggtgatgcccgtatagaaatgtgtatgctcatctgtattgctgccgttctccggctgcgaaaagccttcgatcaaatggtaatgcccctgcacaacatccgtaaccgcccggtatgcgtgtgtgtgcggaggtttttttgaccaatcggactgatacaggcccacaaaagctcactcctttatttttttgataaacgcccaatcaaaaattggtgggctgaatactctgttatcatctcaaatttattcttggaggtaccttaattatgaatgaagaatacacatacgcagcagatagtgatatgagaccgttcgggcggcctggatttgggttcggacggccgggcttcggattcggacggcccggattcggatttggattcggacggccgggttttggatttggccggccttggtttggttatggattcggacggccgtttggtttttacggcggaccgtttgtcggagggcttgtcggggggcttgtcggaagcgctttattcaatccgtacctgtacgggggttacggctacggctatccgtacggaggttatccgtattactattgacgaatcaaaaaggctcctccccgggggcctttttatataggcctaatgtcttgacttggcgggcaaagttcggatattattttattttactgccttaaacaaaaggcataaggattatgatgagagggggatttgatatgattctgggttatatcttcctcacaattgctattttatcagagtcaatcggcgcggccatgctgaaggtctcccgcggatttacgcggtttttgccgagcgcgcttgtagtggcaggctattcattggccttttatatgctttcactgacactgaatctcattccgctcagcttatcctatgcaacatggagcggagccggaacggtgctcgcatccattatcggagcgaaatggtttcatgaaaaactggacaagcaggccgtcatcggactctttttcttattagccggtgtcattttgatgaattggtagaaaggagaggcatgctgatgaaaggattactttgcttggcattagccattgtatcagaagtgttcgggagcacgatgctgaagctgtcggacggttttacgcacctgtggcccgctctcggcgtcattgccggaatcggagcctcttttatgtttttgagcttctctttgaaaagccttgatttatccgccgcatacgcgacatggtcaggtgtcggcaccgctttaacggcaattgtcggcttttttgtttttaaggaggccatgacagtcaaaatgatgatcgggcttgttttggtcatcacgggcgtcatcctgctgaaccgttccaagtctcaaaaagctaaaaaaaatcaaacggcccggagctgaccgtttgaactcgtcaagcgcgggcagcttttacttcaacctcaagctccatctccacgtttccttggactgctcgtgaaatcatacatgaggactctgctttttgcgctaacttcctggcgagcgtaaagtccgtttcggctgcatccggctttaataatataaacgggcggtgaatgattttctggtacgtgaacacaccgttcgtgacgtctacaattccttcagattccatatgtagatcttctttatccaggccgcttctttccatcatcgccgcaagcgttataatataacaggtcgcggccgctccaagcagcatttcatcaggatttgtgccttctccgggtccgtccatttccttaggaatggacacagccgtttccagccggccgcttttaatatcgccgacgtcattgcgatttccgggccaatttgcttttaaataaaagtgatgttttgccaagggacaaacctcctttttttcagtttactcatctttcactcgtttgtctttttttaagcttacgaatactcttgattgatcactctttttatcgtacggacaaaccggtaaaattcctccgtttttgtgaattccctttcgcggtaatcaaaattatcaaaaaacgcttcccgctgttctctgctgatctcaagctgtatgctcagcccggtttgcgcctggttattgatattttcggtgtcaaccccggccagaccggtttttgaggttgccaattctgcagaaaatccgtttcgttcgagagctctcaccaattttttcgcccgcttccggtcgcttcctccgacaagagtatttttctcgtcgcctttataaccgtgaactgcgataacataatggtgctgcttaatgctttcgactgctgaaggctcatcgaacctggtgctcgtaatatgaagagtctggttatcatgcgtttttaatccctcaaacagataggttgaataatcatctctgaaagagcggacgatctcgctcaccccgccctcaattctccctccgtgcggcgacatgatcaatacggggctcccctttcgcttattgtacgatatatgataatcatcagggtcttcatgttcagccaaatctttaaaatctgtgtatgtatcagaagaattcgagggatcagggtctgacgcataatgagcacatcttattagtaagaccattgctacgataatgatgacattaagtaaaattcttttcatcagctctccttctttgctcctttctgaaaaatgacatgttcattatatggatttttgtcaataggtcttatcttaacattctattaacattatcatcagtgaaaaacttcccggtttcgaaaaatcaatggattgtcacggttcaagcgctcaaatgccggacatcagtgaaaaaaggttgagagagggcaaaaaaaaagggaggaacgcccgaattttcaggggcgggagattcacggccggaaacggacggcatcaagaatacgcttttaaaaatgaatatccgcctcccgaagcaaatgcacaggacagaatggagcccgtcaaaaaagttctcatctgcctttttgtacagcaaaatgccgttacagcccgctcatcccctttttttatcataatggtccgttttgaaatggagccgtcttttttcatatatataatatcaatcggaagctgtttttccaaggaatgtctcaatattatgttcatgtatatacctccttccgccggcttcactataaacgaacaaaagttccgtttcaactcgatttcttctcctgaaaaagccgcaagtaaccagcgctcctgaaggacaaacaaactgaccgaacatacggcctgttcatatggtatagagagaatcgccagaatgggaggaaaagtatatatgtttggttactcaatggtacaaatggtgcggtcaaatgctcataagctggactggccgctcagagaaaacgtattacagttatataaacctttcaaatggacaccttgctttttgcacaagtttttcgaaaaaaaggtgaaaaacagaaagaaaatgtcagtcatcattgaatttgaagagggctgccatgaatccggttttcacagcacaggacaggtcttatcaaaagaaaaacgctgcaccataaaaaagcagtttcaaacaatcaattgctgcagcgccgaagtcactccatccgcccttcacatgcttctttcgcaatgccgggatatccgtaaaatctatttaaaccgtgaagtaaaagcgctccttgatacggcagctgaatcgtctcatgcaaaagaagtgacccgtaacggcaccgtattaactggaaaaggcgtaaccgtcgccgttattgataccggaatctatcagcatcccgatttagaaggcagagttatcggatttgcggactttgtcaaccaaaagacagaaccgtatgatgacaacggacacggcacccattgcgccggtgatatcgcaagcagcggcgcttcatcttccggtaaatatcaggggccggcgccggaagctgatctgatcggagtcaaggttttaaacaaatcaggatcaggaaccttggctgatatcattgaaggtgtggaatggtgcatacaatataataaagaacacacaaagaatccgatcagaatcatcagcatgtcactgggcggagatgcgctcagatatgataaagaaacggacgacccgctcgtcaaagccgttgaggaggcatggaatgaaggaatcgtcgtctgcgtcgccgcgggcaactccggtccggaagctcaaacgatttcaagccccggtgtcagcgagaaggtcatcacggtaggcgcctatgatgacaatgatacggccagcaatgaggacgatacggtcgcttctttctcaagccgcggcccgacggtgtacggaaaagagaagcctgacattcttgcgcccggggtcgatatcgtatctctccgttctccgcgttcataccttgacaaattacagaaatcaaaccgtgtaggctccttgtatttcagtctgtcgggcacgtccatggccactccgatctgtgcgggaattgccgccttaatccttcagcagaacccgcagctttcgcctgacgaagtgaaaacactgatcaaacaaagtccggatcaatggacaaatgaagatccgaacatttacggagcgggcgcagttaacgctgaaaacgccgtgccgaaagagtaacctttttatcatgagaacggggtcgtctaaacctgcagatgactccgtttttcaggtgaacagatgaaacatttataatgaaggaactcggaacgcttcagaaccggctgtcagaaaaaaagatcaatgcaaggcagtgtatttctaaaaaaatagggaataagtatggtgtagataaaaggaggaatcacaatggcacttacaaacaccgaattgtctgaatggctgcaaaaacagatcggacaaacgcttgatatcagaaaaggagagctgacagacagccgaaacgagatttctgatatggaccagatcatgcttcaacttgatgatgttctcgtccgccggacaaaccatcccgatgactatgtagcggacgaagaactcgtcttaaaagggcacggcacaacctatacggaggaaggaaatgtcccgcttccccaagatgcgtatgaaatccctctgctcggcgacatcaccatccaaaaggagcaagacggattaaaggtacatacagatcgggccgtttatacaatcgggacccggaaaaaccaataaaaaaacgccctgaatcagcggcgtttttttattggtttttttcttctgaatatccgtggaacatcgtgaatgcgcaaagcataatgcctaaaataatgataatcgggagccagatcacggcaaacttataatccggttcggcaaaagcgccgatgaccgccccaaagcaatacagcaccaaagcaagcgcgcgcaatacagcatctctcgtaaactgcttccgcttgtccgctttgtaaaaccttgcggtgagatcttcaaaaaaattagcgagcgttcccgttaatacggtcgtggaaatccccgctacaccaagttttctcgcggctgtcgtctgcattcccattgcgaagctgagcagcataatcagcacataaacagaaatggcatctgcaaaaaagcaggagaacaaagcaaacagcagcaaaacagctccttcaatagctaaagcggcagttaccgcagggggccaaaatgatttctttttattgcctacaagcagggccgcggcaataacgccggcaataaatccgattaacgaggttaacgatttgagtacggcaaggtgccacgagttgccgatcgccaggccgaacagaacgatgttccccgtcatattggcggtaaagatatgtcccaggcttaaataaccgatcacatccacaattcccgctgttaaacaaagaagtaaaagtgcaatatttcggtatgtagtcactgtcaatgtgatccaatcctttctcatgctgattccaacatataagtttactctttgccatttcatatgtccagccggcgtgccgctttttcagagcataaaaaaactccggcgaaccggagaagctactgaacgataaataatactctcgtgccgtcggaatatccgctcatttgatttccaacccatgaaccggccccgcggttatccgacggggttacatatctgacatcagcccccgccccgccttctgtgcagactgccatgggccattcatcacggtcaaacccgggctttgtcggaattcctttcaatgattctttccttctattctctgctccgccccgatcaattgtacaaatctcagaatgacctgccgaaatggcgtcttttatatgatttcccgtctccggatattttgacagcgggaaatacagcacctgatcgtatcgggatgcggcacgagcagcactgtccgaatggatgccggcgcccgtaaagccgaactgaagagagatcaccaaaagcagacttgccgcccatttcataaacgcattcattcacatcctccttaagaagttgatatgaagcgtaaatatgtatattagccggatttaacacacatgatgaaatggcaaaaaaagtttgctgttttgttgataatcaacgaaaatggcggctttacgatttgtctattgaaccggcttctgtttccttatatattttagacatacttatgagccgttgtgatcagtgtcttcggcagataaaaggaggaatgccgtccggtcggcaggcaccggctgtttgttatgtcttttcaaaaacatgaaggcggggaaatccagatggaaaaaacaatgtttcacccacactcacccgagtttcacgaaaacccttttgcggttttaagcagattcagagcgcaggaccccatacataaattcgaactgcagcgtttcggaggcacctttccggcttggctcatcacgcgttatgatgattgtatggcgtttttaaaagacggcagaattacgagagatgtaaaacgggtcatgccgaaggagctgatcgcgaagctgaatgtcagtgaagatatcgattttgtctcagatcatatgctggcaaaagaccctccggatcattcacgtcttcgctctttggtgcatcaggggttcactccccggatgattgagcagcttcgcaccgggatagagcagatcacagaagagctgctggatgaaatggaaacaaaagcagaccctgatatcatgagagatttcgccgcaccgcttccgtttatcgtcatttccgaactgctcgggattccgaaagaggaccgcgccaaatttcaagtgtggacaaacgcaatggtcgacacgtcagaaagcggacaagatgcgaccaaccaggctctcaaagaatttaaacaatatatgaaaacactgatcgaaggaaaaagaaaacatccgggtgaagacttgacgagcaagcttatttacgctgaagaggacggccaaaagctgagtgaatcagagctgtattccatgctgtttttgttagtcgttgccgggcttgaaacaacggttaaccttctcggctccggcaccctggcgcttcttctgcacaaagaccagatggagaagataaagcggcagccggaaaatatccagacggcggtcgaagagcttttgcgttatacctctcccgtcatcatgatggcgaatcgatgggcgattgaagatttcacctataaagatgtttccattaaaaaaggcgatatgatatttatcggcatcggttcagccaatcgggacccggaatattttgatgatcctgatacattaaatatagcgagaacaccgaaccgtcatatctcttttggattcggcattcatttttgtctcggggctccgctcgcccggatggaagcatccattgcctttactgcgcttttaaaacgatttccgaatatagagctgaaaggcgcgcccgaggatgtaacatggagaaaaaatgtgtttttgagagggcttgaaacattgcctgtcagattttaatatcgcccccctgtttatcgggggtttttttaatgtcttataaacagaaatcaatacaacaatgaaaatttagtacacagtaagtttagttctatatagataaaaaaagcggccggattgctccggccgttctctattaccgttttaccaactcatttgtttcgtccagcttttttctgaaagatttaaggaaatttgcgcttatcgttcctttgtttgcgtacagtttttcgcagaatgccttaatggcgttttgcggctttggttccgacagcattgtgacatgattggaagagtggacgtccagcaggtgaaactgtttcatctggcgttcccattctttccaatacgcaccatggtctagcggaatttgttcttcctctgctgtcagataacgttcaagatctccgaggaacaaaccgcttttattacggaagtagtagcattgcagcgcttccggatgaggcagcggcttcatgtcatactcttccattccgtaagcgagctgcgtcttcatcatttgctccagctgcatccggatcgcttcttcggattttggcagaccgcgctttttggcaaggccgatcaattctttcaatacttcttcttcctcagcctggacggtaatgtcttctctgctgattaatgcctcttcaaggttttcaggcttaagatatgctgtaagcatcgtattgatcgtttgcagcatgactgacttaacagatggttttctttctttccatttttcactgtacggagtgtcgatcatgacggcgctttttaccgtatgaccttcctcctgcaagaggcgcgcggtttcatatgcaagcattccgcccaaggaatatccgccgaggtcataagggcctttcggctgtaccgcttggatgattctcttataagaagcggccgtctcttcgattccttgcagcggctctttccctgtcaaacctcttgcctggatgccgtaaaaaggtcgctgactctttttggcgaatggctggtatgcttccacgcctcccgttccgccgtgaaaccaaaaaacaggacggcctttttctctatcattcagcttgacgagttctggaaaatttcggcccgcctcctgcgattggttcgtttttaacagcatgccgatctcctgaagagtgctgcatttctgaagagcctccagactgatgcggctgtctccgtcctcaagtttcttcaacagctgaatagaggagattgaatcgaagccgtattcagtcagcggcttattttgatccatttccgctgccttcatccccaaaatgtctgccacaatgtcagccgcgctcccgcagcggatctgaggattctgtgaaaccggtgcaaggctgatgtcttctgactgaccgccgttccaatacttatggttttcaaaaggatatgtcggaagcggcactctttgaacagatttgccttggtggagtctgtcccacggtatatccgcacctttcacccagcaaaatgcaagcttttcgagattgttttcagccaacagcgtctctgtgacgactgtaccgagagtcccttccagtaaaacgccgatatctcctgatccagtctgctgactgcctgtaaagaagcttttcattccattgccttcttcggaaaatgctctgtactctttcagtttttccagcaattcatcttgattgcgggcaacgagtgccaggcggcagttcatcgcctcacggccggtctgaagcgtataagcaatatcccgcaatgacggagtatctccagtttgcacaaaatcagccagctgacttgcggccgccttaagacgcccttcgctcttagcagaaagcacgataagctgcggttcttgcgcagattctttgtccttatggcgcgggctgtactgttccaagacgacatgcgcattcatgccgccgaagccatagctgttaattgcggcccggcgcgggatcggtctgcccgtatggtcggtgagctgtgtccattcctgattgtcttcggtgaaacggaagcggcttttctgaatggccatttgctcatttgcagctgtaaatccgggaatgcccgggatggtatgatgcttcatggccatcgccacttttataagggcggccagtccggaagcgagttcgccgtgcccgatgcaaggtttcacggtgctgatataacaaggcgcgctttcctcttgatttgcagactcgccgtaacccgctttgattgcattaaactccagcgcatctgccatttcggaggcaatgccgtgcgcttcaatataagtgacggtttgcggatcaacatcggtgtcttcgtacgcttttttcatcgcggccttcattcccgccggattcggcgcgtgaagcgacatgcctttaccgccgtgagacactcctgttcctttaatgaccatgtgaatatgatcgccgtcttcaattgccgcctcaagcggtttgatgatgataacgcccgccccttcgcttctgacaaagccatcggcatctttttggaacgatttcgcccggccgtttttgcttaaataccccattgaatcaaaaccgataaagcccttcggcgactgcagaatattggcggcacccacgacagcctgctcacattcgttatgacgtattgattgaaccgccctgtgcaatgccaccagggttgacgtgcaggcagcctcgtaatattcactcggtccttgtaaattcaaggcatatgatattctgttcggaatgatggacggaatggctgttccattgttcggatcgctgttgcccgcggcaacgaaaacgcctgtcggtctgcttgctaacgccttatttgtcaggcccgcatcctccattgccttccatgtatgcatcaaaagcagaaactgctccggccccatttgtgatgcctctttaggagaaattccgaaaaagagcgggtcaaattcgccgacaccatcaataaaaccgccccatctgagactcgtgtcattctcatcaccggcgtaacggcgccagtcccagcggtccgccggaatttcggtaatacagtgatccccgtttacgatgtgctcccaaaaagactggatatccggggattgcggaaactgagctgacataccgataatcgcgattccttgcttgacatcggcgttatcacaaggcgtatgctgtttcttcggtaaagtgcgctcttctgtttccgtgaccctggcctcttctgaatgcttatgatcggcaagcagttgagaaaacttgctctcatatgctgacgcgaagtggcgggtcagctcctccgcggtcggatactcgaaaaacaatgttggattcacatcgatgtccgcctcttggccgatctcttttgtcagcccgatcaggctcgctgaatcaagtcccaattccatgatattcgcgtcagaacgaagagatggcccgggttcatccatcatcttggcgagcttgccaaggacgtagctgcggatatcatctgtcagactgccggcggaaatcggtgctcccgcattcttaacagccgttcgggccggctgattcatctgttcggttttcgggcggaaccgtttcaaggcatagccttcaaaacgcatcaccacttccgatcggctgctgatgacatctgcgttaatcagaatcatttcccccgtttgtttggtcagcttgatgtgcagccagcaatcggtaagatcttcagggctgctgaaggtgacggaattaatgccgaacggcagatagctttccgcctccgtttgatccaataaagaaagcgaggccaagtaagcactgttggcaattaatggatttacgacataatgatgcgctcgttgtgagtcgctattgttcaggttcactttcgctaaaacggcatcagagcctttgtacaggcgggtgatcgttttaaattcttctccccacacgacggttcccgttccgtctccgtataactcatctatccggcccacttcccggtaagagcgctgaatggccgccagatccgcgtgctgcttttgaaacagatacgggctgcactcggcatacgccgctatgctccaatcaggagacgtgcggctgcggtgcattatgctcagttcaaatccatccccattttgtttcgattctgttttcagctcgatgcgatcgcctttttttacggtaatggggctcgcgtaattcagttttttaatttgtcctccttccgcttcaggaaaaagatcacaaaaatgatcgactgccagactgttatatgtagcgccgacgagtaccggttctccgctgaattgatgccctttcacgtatggatcgtcatcactgtataccgcctgaacgccgccagcgttttctgattcaccgaattgaaaagaagtcccgtggtcaaaagcgtaggccggcagatgaacggcgtgctcttgctgcaactgatcaaacgcgatattctctcctttttcccattgccgcgcacgccggccaatatcagattcagagaaattgagattccgctgatccatgcggtaagcggccagcttttccaacagttcctgaacggaggaagccgtaaatgccgcccgatactccgaatgatgtgttcttttttgcagcgcggatgcgatggcggccggatgaagagatggcgtcttttctaaaaaggccgccagtctgtcaagataggcttcaaaactccattttgttttcgctgacacagggaaaatatattcctcaccgccgtgacgggcctgatcggaattcgggctgatatattcttctacgatgagatttgcatatgccccgcctgccccgaaggaattaatcatgcttctccgcgggatgatgtcccccgtttcggcatccctcatacgctcccaatactcgtttttttcctgcaggtaaaaagccgtttgttcaaggttgatattcggattttgcggttttgcgttaatcgtcgggactaatgtttcccgctccatttgcagcagcactttcgcgagctgggacatgccggaagccgcctctaaatgaccgagatttgacttgacggacccaagcgcgcaaaaacgttttttatcagtatattgcgcgaacgcatttgtcagggcaatgacctcaatcggatctcccaatacagagccgtttgccgctgattcaacataactgattgtttccggattgattccggccttgtcaatggaagacgccatgagcttcgcctgctgtttcggatccggagccgtgtacatctgccttccgccgctatggcacaacgcgctgcttttaatgaccccgtaaatatggtctttgtcggcaagcgctttggagagcggcttcaagagcactgccccgactccttctcccggcatcaggcccgtgccggttccgaagcttttgctttcacttccctgttcaagcaaattcgcccgttcgagcgcatcatatttagacggttcaagcgtgagattgacccctccggcaatcgccatggaacagctgttaagcttcaggctttcacaggcgagatgaatggcgctcagtgagctggagcatgcggtcgtaacgcccatgctcggtcccgttaaattgaaaaaatgggaaatgcggttggcgatatgccaatcccctccgttagagctgagcgcagctttttccaatgacgggatattccagaaatattgattgtacatactgcccataaatacaccgatgccgctgtctgattcctgccattcgtttactctttctaacgagtagcctccgttttcaaatgtttcccatacggtttcaaggcttagacggagctcaggcgtcatctccatcacatggtcttcccggatgtcaaacaagtgatggtcaaaagcgtcaatatgctgcagaaatccgccgtaccgtgttttgcgttcttcttttcgtgtttcttttgccattgttttcagaagaccggatttccatctgttttccggagcttccgtaatacagctgtctccggcttttaaatgctcccacagctcatcgagggtttcagactcgggatagcggccgctgatgccgataatggcaatgtcgtcacaatcagaacgattaacggtgacggtttctatttccggctttggcgcttttggctctttttgttcagtgataaaccgccgcgtttccgtgacaagcggcaccggttcattcattgcaggttccagatgctttgtttcaggaggcgcttgttcggctccgaatgcctgttgcagcttatccgggtaagtttccagcaaatactcggcaagttctttcgtattcgtgtgttcaaataagaccgttttcggcagctcgcccgtcaatgtttccagttcgcggataaaattcacctgcaaaatggagtcgatgccgtatttttcaaagctggtttccggctgaatgcgctcgggagcaagctttatggacttggctaacgtttcttttatgaattgcacagtccggtctgtgactgagaaagacggttctgtgacatcagccggctctttggaagccgcagtttcttcaaccgcctgtgcgtccggctgcttttgcctgatgacaccgtcgctttctgccgccacgatctgctggccgaggtgatgtgacgattccgccataaatgtaacgtaccgatatccctcgctttccagcgcagactgccacgcttcaggatacagccccgggcatccgggtatgcgcagtttggcgtcttcatacagccaccagccttccaaaaggccgaatgtcaggtgagaataaaccgaatggctgctgatctcatttaataacaaaatcccattctttttcagcaccgctttggcattgcgaagtgtccgccgaatattttttgtcgcgtgaagcacatttgccgcaattaccgcgtcatatgcgcccgcctctataccctgtaaagccgggggctcttccacattaaaccgcttataagtcaaatacggattgtcgggaccgtattctttttcagcatgcatgaaaaaggcctttgacagatcggtgtagcaatattctttcacatgatgtttgtactcttttaatcttttgaaaacggccgcgctcgtcccgcccgtccccgctccgatctctaatatccggatttccgcgtccgggtcttctttcaggcgttcttcaatgaaagccgtcaatgtgtcagcgagcacctcattaaaatagtctgccgtttcattgtttttatagattccttccaccaaatccattgaggaatcaggaaacagaacatcagtggcagaaactctgccggataaaatatccggcaaagctctgagagcggtctccactaaggtgatcatcgcctgtttgctgctgtccttgagtaaaggagctttcttttcatcccattcttgccacagaacgtccgcacgctctatcggacctgttaacacatacgtactgcctgactgtttcaaaaagcctttttgcaccaagatggagatgctttcttccagccacctgccgtaaaacccctgcatgacaggctgcgtttcgttttccgtaaaaaatccgacagatttcagctggcctgccaatagtttgtaaagaagatcttcagtgttttgcaaagccgtcccctccttaactcaattgttgtacatgtcttgttactttaggctgatagcttcgcagtttttgcatcgccgagccgtgatgttcagggtatacttctatcatttcttccggtttttcctccggctcttccgcctgtttcatcatgacgaactgattcaacgggccgccgagcaatcgttcaagcgccgccattgcttccggcgcttcaattgatccgactcccgcctgtttcatccgttcttgatagtcggcagatgatacgattccgacactgccccagtagctccaattcatcactgccgccgaatacggccgcgttttagccaaatgagcggcaaaggcatctttgaaactgcatccggcagcataattgctttgtccggccgctcgtgcaaatgattgaacagatgagaagaacaaagcaaagtccagcggctcattttggaacacgcgggccatattcacgctgacattgactttcgcagcgagcacgcttttcaaacggctttccggcatatttgccaggctctgatcctctaaaacaattgcggaatggatgattccgttaatttgcgggtgcgtgcgtttgatcgtttcatacgcacgtgtgagctcattcggatttgccgcgtcagcttcaatataaatcggcgccgggccgaattggctgagtctgtcgattttttcctgaatggcgctgttatgttttcgtctgccgatccaaacgactcgcgcctgatatgttttcacggcatattcgctccatgcctcgccgatgccccccgcgccgccgatgacgacataaacgccgcctttttggtaggcgggccggcttgacaccggctgctgtacaggaatgaggcgctgtttgtaccagtgattgttccggtacgcccaagtattgccttgctcatcaaacggcgctgagaacagctccgcctttgaaacatcttccggacagccggcatcaatcagccttgtttgccagttcggatactcttttgcgagcgagccgaccaacccgtgaatgcctgcatgagccggatcaataatgtccgccggctgtacggactgtgtttttattgtgactgcagtcaagctgattcgcttgtctccatatcctaaagcaagcatggccttaatcactctgtacatctggatgacgcccgcatcctgagcttttaccatgtcatcagcgctgtgaaaaggagcgatccatacgatatgcccgaaagaccctgttgctttcagttcagccgcaacagcctctattttatcttccgggttgatatgaagccgtttcgcagaaggatgatgcaattgaaaagccgcgctttcctcatcccccgcgataaagacaacctcttccgtcttatatgccgggctttgatcacggaattccgcgagatcccacaccggagccagaaggtttgctccatttaatgatgtttccggcgcggggccttccatcattctggaagaaatccctttaattttgacacagacccggccggtctcatcgcataagtcaatgtccatacgctgtattttttcatccgttccccgggagctgacatacgcccacatgcttgtcgtgcatggactgaaaatgtccagttcttcaagggcgaacggcagtgacagctggttatcatctgcgtgcagcttcagaccgattgtcgcttgcaaagctgaatcaagcatacacgggtgaagaacgtattgatctgccgtttcttcgaggaaggaaggcagccggagctcagccaatgcttgattgcttccgatatgaatctgctgaattccttgttgtcctggaccgtagtcaatgccgattttgctgaatgagccgtaacactgttcagaagtcagtatactgaggccgcattgagctttcagtgcgcctatatcacggtgcggagcctccccggcgctgagaatgccggcagccccctgactgtgtatctgcctgccgcttgcttctgtttgtgagtccgtgtaaatgtcatacacgatttcaccgttttccctcgggttcaagctgatttgcgcttcaatcgggcgggttcccgcttcgatcggccgaacccaaacgatgtttttcaggcgggtgacagaaggacgttccttttgccctttgactgcctgagcaaccgccgccctagccatttccaagtaggcaacgcccggcataaccggcttgcctttaataagatgatcggtgaaaatcgtctcttgtcccgtaaattcggatcggtaccgctgctctgttaaatctgatacattttcgtgaagcagcgggtgcagcacccgcgacgtcggcacagcttgcggtttctctgctttcggccgattgtccgtgatccagtaccgctctttcgcaaacgggtaagcaggaagactcatccgttgaggcttgatatcagaatataggccgtcccatttgatatccgcgccctgcacccataattccgcaagcttgtcattctctcggcggcttatcagctcttcgatatccgcttccccgtttgcgcctgccagaatggatttcagggaggttttacccgcttttcctttataaatacccgctatatcataacgtcctttcgcacagctctttagcttgtcccgcagttcttcggtcgaggaagcgataatggccgctctttcttccatcgcatcacgcccctgctgaagcgtgtaagcaacatcggcaagatccgcatccgtaaaagaagcttgcgccagctgctgcgcctgttcctgcagacgctcttcttctttggccgacagcacaaagatttgagggtgtgtgaaaacagctgtttttctttctaccttcgggatatattcttcaatgacgacatgggcgtttacgccgccgatgccgaaagaactgattcccgcacggcgcggcagatgattgccgttttcgtctttcaatgccgtccattctcttttttcctgtacgatgtaaaacggactgtctttcagcttgatatacgggttgatgacctcgctgtggaggctttttgcaagtgttttatgcttcatctgcatcagcactttgatcacacccgcgacaccggctgccagtgacaggtggccgatattggttttggccgaacccagaccgcagtgactcgcataaacggcggaatcgcctgttttttcgtacagcttttgaaaggcggatttcaggccgttgatttcgaccggatcgccaagctccgttccggttccatgcgcttctatataagtgacggttctcggatcaatgcctgctttgtcataagccgttctgacgacttccgcctgggctttcgggttcggtgtcgtcaaggagttcgcacgtccgccgtgattgaccgcgctgcctttaatgacgccgtagatatgatcgcccgctttttccgcttctgacagctttttcaaaaacagaattccggcaccttcactgacagcaaatccgtccgccctgtcggagaatgttttacatttcccttctttgctcagcgcacccgctttgtcataagcgatgtggccttgcggagtgacgacggtattcacgccgccggcgatcgccatatcgcagttcccgttttcaatggcgcatacggcgtgatgaatcgcgaccagcgagctggaacaagccgtgtcgatcggttcactcggcccgtgcagattaagcatatagctgacgcggttcggccccgctgacggactcatatttgcggctgacgcaccgccgatatccaggtcggaaaacagtgagccgtatccggtattccccgtgccgatatacaggcctgttttcgtgccggaaaggcttttagcggaatatcccgcatcttctatcgccttccacgcatacatcattaacaagcgctgctggggatccatctgttcggcttccagcggtgaaattccgaagaacagcggatcaaaatccgcaactccgtcaataaatccgccccactttacatttgttttattggcttcattaagcgggtcaccgtaatactcacgccagtcccagcgatccgccggcacctctgttatacaatcttttccctcttctaagttgcgccaatactcatcaatatttgcggccttcggaaacactccgctcatgccgacaatagcgatcggttccggcttatgttcagccgccgtctgaacaggctgtacggcagtttttgcaaatcgtttgttccctaccagtctgataccgccatcatcagttacgctgctttgtttttcttctttcggctgtgtgctgccggcaaattgtgtttgatagtcttctgctaaatgatgcgctaaggcttgaatcgtcgcatattcaaaaaatacggtcggtgtcagatcaagctgataagtgtcattcagcttgttggcgaattccgtcagcgtaatggaatcaaatccgtattgattaaactccaattcgatatcgatttcttcaatatttattttcagaagcccggaaacctcttttgccagcaattcctgaagttttgccgtcaggtctttcggcgcaggcgtttcctccgttttcttaaccggtgcaaaagcggctgccggagtcttttgaagcagcttttcccgcattacggcgcggtttccttccatgacgagcacgcttgttttccccatgctccatgcgttgtaaagagcttctattccggtctcagtgcgcatcggcgttacgccggttcttttttcggtgagcttcgccatttcttcattgacttgcattccgccgtttttccacagcggccaattgaccgacaatgtgtgaccgtggcggtacattgcggtaaccagtgcgttgcggtatgccgcatagctgtccataaatgcgtttgccgccgcataatccgcctgtcccgcattcccggtgacgccggaaatggatgagaaaacgatgaaaaagtccagcgctaaatgctcggttgcttcatcaaggttgacaaatccgtccgttttaggagccaatacactgtaaaactcttcggttgttttctttgcgatatactgatctttcatcacacccgcgctatgaatgatgccgtgaaggccgccatattccgtctcaattgttttgaccaggtctgccgcagtttgagcgtttgttacgtcagcctgcttgtattccgcttttgctccgagtgattcaagcgattgcagctgcatccgctgattctcgcttaatgccgaacggcctgtcaaaaccagtgtcggctctttgactttgcgggcgatttctttcgcgaaaataaagcctaagcccccggctcctccggtaatgagatatatgcctccgtcgttccacggaatgcgtattttgccgccggacacgtccgtttctttgacatctgcgcagtatcggatgccgttttcatatttgatatggctgtcatcagcccgtgttttattttctctgatgatgtctgtgattctgccgttttccgccggttctatttcaatcagctgggttttcagttttttatgttccaggccggctgtttttaacaaagctgaaatgcctgagagcagctgatgcttatctgttttagagagaaccgtctggatgaggacgtctccatccgtctcttccttcagcagtttttgcagcgtctccaatatccgtcctgtataatcacggaagcgcgccgctttcccgtgcctggaggtcatttcaatacattcagctcccgcggcttcaacggcttgtttcaatccggcgtctgtgtcacaaagcaacacgatatgccgggcaaaaaccggttccgtttgagtagcagtttcatcgcttcgggtccataccggctcaagcatgagcgtttccggagctttttcttttttctcagattctttttcagccgttctgaatgacaaacctttcagccttacgcaaaccttgccgttttcatcacaaatatcaagatcgcgtttttcaatctggccggctttgtggtcttcagaaagtctggcgtaaacccacatctcggcagcgcatgcgctgaatacttcaagctcctgaaccgcaaacggaagcatcagtttttcatcatttgttccggttaatatgcttgatgcctgcaatgcagagtccattaagcccggatgcatgacatactcctgtaccgtgtccgcacaagccgcatcaagtgacagtctgcccaatacgaaatcatcacctgtataaatcgctttgacaccccggaaagccgggccgtaatcaaaaccgattttgcggtacatatcgtacacttcatctgcagaaaacggtgtctcggaggattgtgatctcagcttttggagatcaatgaccggtgcctcggcgtcagggcggactgatactgccccttggctgtaaacggacggctgatctgttttccggccgctgtaaatgtcaaattgaacgtcatttgccgtttcaggaatgagacggatgttgacatgaaccggctcgtcttcaatggtgatcggccgcacccaaaccgtattcttaagcttgacgcttccttgtccggccggaacttcagatgcctgttccattgctgcgcgcgccatttcaagatgtgccactcccggtaaaatcggtacgccttttacaacatggtccgcaaggtaaaattcttttcctgtatagattgaactgaaccgctgttctgcaaggtttgaagtatttctgtgcagaagcggatgaagcgcgtcttgttttccggcagatacagtgcttgttttttcgtgttttccggtgctttttgccgcccaatagcggtcttttgcaaaaggatacgatggcaggctcttgcgtttaggcggccggtctccatacagcttcgcccaatcgacgttcagccctttgacccataattcaagcagcttcgcgtatttgccgcgtgccatccatttttcaacggcttcttgaatttcttcatcttccgtcagcatttgcagcgtgcctttgtctattcttcctctgtacaagtccgcgtgcttatctccagtgataaactgtgacagtttttcctgcagttcttctgcagatccggcaataaccgccaggcgttcttccatggcgtcccttccgatttggagggtatatgccatagaaacgagggaggattgatcgtaccgtttttcagtaagcacacgtttcagctgttttgcctgctctttcaggcgtttttcatttttggcggacagaacgaaaagacatgggtcgatatgagaatcatctgcttcctctctgtcttctggaatgtattcttcgatgacgacgtgggcatttacgcctccgatgccgaatgagctgatgcccgcgcggcgaggctgttcgtttccgcgttcgtccgtctgcgtcttccattccattgtctcccgcaccagataaaacgggctgtcttcaagctgaatgtacggatttaccgtctcacagtggagactttttactagtgtccgatgcttcatctgcagcaaaattttaataatgcccgctgctcccgcggcaagggataaatggccgatattcgttttgaccgaccctaagccgcaatagccggccgctttctcttttccgtctgcaaacgcgctgaacgcttgtttcagtccgttaacttcaacgggatctcccagttctgttccggtgccgtgcgcttcgatataagagactgttttcggatcaatgcccgcttttttgtatgcggctttaatgacttccgcctgttgtttcgggttaggcgttgttaaagatgccgcacggccgccgtgattcaccgcgcttcctttaatgacgccataaatatggtccccatccgcctcagcggctttcagctttttgaggaaaaagagaccggctccttcaccatgggcaaaaccgtcagcctgatcagagaacgttttgcatcttccttctttactcagcgcgcccgctttgtcaaaactgatatacacgtccggaagaacaatcgtattgattcctcccgccaaagccatgtcgcacgttccttcttcaattgaagaaacggcatggtgtatggcaacgagtgagcttgagcaggcggtatcaatcggctcgctcggcccgtgcagattgagcgtatagctgacacggttcggtccgacagacggacttgtattcgccgcggatgacccttcaatcgccgcatcggcattggctaaaagagaaccgtagccggtatttccggtcccgataaacacacctgtttttgtgcctgagagactctttgacgcatacccggcatcttcgatcgctttccacgcgtacgtcagcaagaggcgctgctgagggtccatttgctccgcttcccggggtgaaatcccgaaaaataacggatcaaattcagcaattccgtcaataaatccgccttggttgacgtttgttttattggcttcttttgcgggatccccgtaatagtcccgccagtcccagcggtctttcggaatctcggtcatgcagtctttgccttctttcaggttctgccagaaagcttcaatgtcttctgccatcggaaaaatcccgctgatgcctacgattgcgatcggttccgccccttggccccgctgcactgtctgcggaagtgtctcaggcagagtgcggcgccgcttaacggccgggcgcgtgatttgagtctcttttaccggtcttgccgattgaaccgtttttgtatttaccgcaaaccgtccggcaaattcctcttcgtattcactgattaaatgaacggcaaattcatggattgtcggatgatcaaagaaaatcgtcggcgttaacgtaagccggtacgttttgtttaactggttcgtaaactcagtcatcgagatggaatccagcccgtattttgtcatttcttcatgagggtcaattttgtcaatgtttacttttaacaatgaggccgtctgctgttttaacagatgcttcactttttcaagcaggctgtcagcatcaatgtcatgacgtacgccggtctctgcttccggatgatcattctctttgcggaacagttttgctttcatatgtttcacatctccttcaacaaccgtcatccgggttgtcccgctcatcaagccttgatataaagccttgatgccggcatctgtgccgagcggtgcgattcccgcctcctgcatcagcatatcttccgtctgctttcctgcctgcattccgccttctttccataacggccagctgacagaaagcgtctttccgtatctttgtcccgcggcttgtaaagaacggcggtactcggcatacatctccataaagacatttgcagacgcataatcagcctggccgacgcttccaagcacacctgataaggatgaaaagacaataaagacatctaatttctcatgttgtgacgcttcatcaagatacacaaggcccttcactttcggagcgagaacgtgttggtattcctctgccgtcttcttcaccatgtagttgtcttttataatgccggcactgtgaacaatcccgtccagcttgccgtgccgtttgcggatattgcggatcaatcggtatacttctgcttcgtccgtgacatcggtctgctcgtagaaaacagaagcgccggcagcacgtactgtttccagcatgtctttctgcttttctctgagagcggaccggccggttagtatgatgacggcgtcttttgtacggtttgcgatctcttttgcaaagatcagacctaaacctcccgcacctcctgtaatgagataaacaccttcgtctttccacggaatatccggctccgcttgagaaatctccatctcttcccaatcagcggcaaagcgcttgccgttttcatatttcacatggacgctttcggcatgcatacggttttcggacgctttttccgctatgccttcagcactttctttctcctcggcttcgatcatttgacagatcagcttggaatgttcaaggcatgcggttttgaagaggccggtaatgcctgaaaacacccgctgtaagcctgctgatcgcgtaacagcctgaaaaagaacgcggcccttcggcttgcctttcattatggttttgatatggtcaaacagctggcccgcataagaatgataccgctctgcaatagatgcgggacgctcgtccaagataatgacgcttgcatgttcaagctttgcttcgacagcttgttttacggcttcatcgtactcacaaaggaaaatgatatgctcttcatatgaaggcttgtgatcggccggttccgtatgctctttccagaccggttcagcgagcaatgtgtccgtacggctgaccgaaacgccggcacccgcgttttcttccatgatccgtgttgagaaacctctcatccgcacacaaagcccgccgttattgtcatataaatcaatatcggctttttggataggatcgccggctttattgttcgcactgaatgtgacgtgcacccacatatcatcagcgcacggattcagaacgtccagctcctctaaagcaaacggcaatgcggctttgaatggttccccgctttctgcaagcagcgctctcgtcacgttttgcaaatattcggcggcctgaagcgcaccgtccatcatactcggatgaaggatataatcagcttttgtatgagagacggattcaggaagcttcaatttagcaagcagccggtcatcgcctttgtatacaagctgcacccctttgtatccgggcccgtaatcagcaccgatcattcctttgtaaaacgcttgagattcgattgttccctgtgtgcaccggcgcttcagctgctcaatatccgccgcttcctccggttccttccggatgatttcagcgatgccctgattataaagaggagcttcttcaccgatagaatcgttatccccgtacattctgtattgaatctgtccgtcctcttcttcataaaatccgatatggacacggacagcctcctgatcggctatcaccggacggacccatacaatattctttaagcgcaggcccagagattcctctgttgccccgccgatgcttttctccgccgcggcccgtgccatctcaagggtaacggcagccggcacgatcgccattcctttaatgatatgctcggcaataaaatactcttttcccgtgaattccgaactgaaccgctgctcctgcaagacggatgtattctgatgtaccagcggatgcaaaagcttggtatccgtttgcttcacagttccctccggccagaagcgctcttctgcgaacgggtaggtcggcgcactgattctttgcggcgcggaatccggatacaataagccccaatcgacacgcgctccttcaacccagagcgccgcgagtgctttcagcttttcatcccgtgtctgacatgccgcaagctcttccatctcctgagctgacacttctctgcttctcactttttcgccccgtaagatgttttggtcattgccgttgatgaaatcctgcagctgacgcttcaaatcgtgacgatcatgactgataaaaacggccctctcttccatcgcttcacgtccggtctgatacgtaaatgccagatcatgcaaggaaacatcgttttcggcttcatccagaaagccggataaacaagatgcataggcagtaagacgctgcttatttctcgctgacagcggaacgatataaggcggctgtccgtcatttgatccgctgatcgttttgttttcatactgttcaaaaatggcgtgtgcgtttgttcctccgagtccgaatgagcttaacgctgcgcggtgcggcgtctccctctccggtagcggttttctcttatccgccacataaaacggcgaaccgctgaatttgatattcggattcggtgacgtgtaattaatggtaggcgccagctcccgatgatataaactcatggcgactttgatgcacccggccagacctgctgctgtatccaaatgtccgatattcgtttttacggaaccgatcccgcaatactgctcccggtccgtgtaacgtttatacacttgctgcagcgcggacatttcaatcggatcacccaatgtcgttcctgtgccgtgcgcttcgatataggaaatcgtctccgggtgaatattcgtgctgtctaaaacatgctggatgacgtcagtctgaccttttacacttggtgcgtaaaaaccgactttatccgctccgtcattgttcagaccgatgcctctgagcatggcgtatatgtgatctccgtcctgaacggcttgtgacgcctttttcagcagaatgacggcagctccttctccgcccgccataccgtcggctgaagcgtcaaatgctttgacatgcccgtcgcttgaaaaattcaatccgttttggtgcacatagccgatgccggtcgctgcatgcagagttgctccgccgacgagtgcgtattccgattctccgctcgttatgcttttgtaggctgaataaagaccgactaatgatgatgagcaattggaatgaacgaaatagcttggcccttttaatccgagcttatgggaaaccatcgtcggaatagtgccgctctgcgctaacacccatgacacatagccgtcgggagattcatggccttctgtcgttttctccggcaaaagcgaccgatacgaattattgcttgccgacatataaacgcttgtcttcggaatctctttcgatacatatcccgcgtcctcgacggctttccaagaatgaagcagcagaagccgaagctgaggatccataaattctgcgtctttcggagaaatgtgaaagaactcagggtcaaagagatcttttccttctatcgtcgataatgccggcacatagtcgggattttcgatcaaatcttcaggcacgccggcttcccgaagttcttcttccgagtagaaccggacgctttcctttccttctcttaactgcttccaaaactcatgatgatttttcgcgccggggaactggcaggaaatccccactatcgccacactgtcatcaaagtaagacggcaccccgttttgcggtgtttgttctctttctctctcatcttggccgggcgcctctgattcagccgcctgttttgtttcaacaataaatcggctgatcgcctgaatggtagagtgttcgaataaatccgtgacggtaaaatcgcattcaagctcctgtttaatgcgttctgccgccgcaacagccagaagcgagtcgcctcccacatcgaaaaagccgtcttcgattttgatgccccccgtattcagcaggtcttcccatattgcggtcactttcgcttccgcttctgataacggcagtctgcccgtcttttcagaccggtgaacgattaccttgcgctgttttaggtctttgcggttcacttttccgctcggtgttaacggcagtgcatccaggcggataaaatgggcaggcgccatataatccggcagactcgataaaagatggttgcggagcgctttttcatctgccgtatgaccggagcgggccgtataataagcaatcagctttttatgtccgttcttttcctgaaccacaaccgcctgatcaagaatgtccggatgttcgctcaatttcgtttcaatcgctcccaattcgatgcggaagccgcgaattttcacctgactgtcaatccggccggcatattctatatttccgtcaggcagccatctggccaaatcacctgtcttgtaaagtttttctccttcactaaacggattatcaataaatgatgccgccgtcagctcaggctgattgtaatagcctctggccagaccggcgccggccacgcaaagctccccggccacaccgtcagggacggggctgagcttttcatcgacgatataaagccgcgtattgtgaatcggtttcccgatcggcgtattcctgcttgtgatttccttttggccgcagctgtagtaagcggcataaatggatgtttccgtcgggccgtatatgttttcaattctggcatgtttgaagatggaaactgactttttaactaaatctttcggaaacgcctcaccggccaccatcacatatttcacagggccgtcttctgtaaatgccgtatgccgctttaccgtttccagaaatacattaaacacggcgggcgcaaaattcagatgcgtgacctggtgggtttggatatattccatgcaaagctgcggatttttttctgcaccaggcggcaaaatgacaagccgtccgtttccgataaaccagccgaataattcagaaatcgaaacgtcaaatacgtaattcgtttttaacagataggcatcctcttgagcgaccggatactcagcttccaaaaactgcagcgtattcatgatggccctgtgctcaaccatgacgcctttcggttttcccgtgcttccggacgtatatagaatataagcgagatgatgcggttttgaacgcggcgtcagttttgccccgctgacagaacgtccgctgttttcaatttccaccgtgctcacaccgccgatggccaactgttcaatcatgccgcgcgtcttttcctgcgttaatacgattgacacgccgctgtcagtcaacacgtgggccatccgttcgtttggaaaagccgggtccagcggtacatacgcgcctcccgcttttaaaatggcgaggatgccgatgaccatctcaaaagaacgctccgtacaaatgccgaccgggcattccggtgtgacgcccttttcttgcaggtacacagcgagcgccgtgcttcgttcatctaattcgcgatatgtaagactgttttcaccgaatgtgacggcttctctgtcagggtggcgtccggctttttccgcaaacacttcatgaatgcagcgctctttcggctgatgggatgaacggctttcatcccgtctttgattgagcaggccggaacaggcttcaaaagcgatctccggatcagaaagcaccttttctgccagtttcatataatgctccgccattcgttcgatgaaagaagggctgtagacatccgggttgtacagaaattgcaggacggttcccgtttcttttttatagacttcaagcgcaagctcaaattcgccttcctgatgaatgtcttctatcatttcaatgccgagtgattgatatagttccgccagcttttccgctccttccgtccggaagaagttttgatagaaaaacgcggtttgaaaaacaggcgacaccgcaggcgagcgttccgtcttcaattctttgacaagcgcgggaaacggatacgcggcatggtccagcccttctgccagtgtcagctgcagctccttcaaaaacgacgtaaaagatttggcgcccgtctccctgcttctgaccgcgatcatattaataaagtagccgatgacagactcaaattgagcctcagaacgccccatcgtcggcatgccgacgatgatatcttcctgattcgtatattgatagagcagtcctttgaaaatagcgagatacacaacggattcattgacattatttttttgggcgcaaactttaatctgccggttcagttcatcaggaagcaagcgctgatacgcctgccctttgcacgtttgaaccgatgatctcgggtaatccgacggaagctcaagcaccggcagcggtccttccagctgctttttccaataagagagatgcgtttttcccgcttcgctttccagcagctctttttcccatttcacaaagtcatgataatttgcggcctgctgaagcatgacaaattctttgccttcacttgcttttgcataagcgtccagcagcgccgacataaacgtcataagagagacgccgtcaaaaatgatatggtgaatggtgattaacacaatcggctcccgcttcgcccgccggaatacttgaacacgcaggagcggcccggtttcaagcgagaacggttcttttgctttttctttaataaacgaaagagcgtcacgcccgcttaattcagaaagatccatttcttcaatcggaaaatgccgatccgtatcttctatctgatacggaaggccgttttcctcttttatcacactggtcaaaatagggtgctggcgctgcacggacaaaagggcgtttttgaatgtctcgatatccagcttttgaaaacgaaagcataacggaatgttatatgcgctcatctccggaaacattttctgaagcatccacaaacctttctggccttcagaaagcggacgttttgcagttgtccgcttgaaagcctgaagcttttgttctacttcagcgatggtgagcgttcctgatctgtaggcatcgagaagttctttatgattcataggtcttactcccttctatgatgtcttgcactcttttaaaatctaatgtcccctcagagacctgtttcatcatggcgatgatctcctgatccgtatactccttgttatccggagcggcggcttctgtttcggtttcttccgttctgtaaaacgtttcgatcgtttctttgtgttctgtcaggtaatagctgatgacgtctccgagcgtggcatagctgtaaaataacgccggagtgacttcaatgccgtaatgacttgtcaaaagagcggcaaatttggctaaatagatggaatcaaatccgaattccgcccagtttttatgcaggacgagtttatctttagatattttcagcagactgtgtatcagctctttcaaatccgcttccagccgtttttccgcgctttcttccgggatgcggcggctcacggtttccaaaagcgcatccggttttgatgaatcgtcccgccgtatgcctaaaaatcgttcggcacggcttctttcgccggcaatgataaggcactgggtgttgtcttgagaaataacgcgctcaaacagctcaatgccttcatctgtttctaacaggcgctggccgcttgatttcaggtacatgcccgtcgtctcttcaccgccgacggccattccgccgtttttccagaccggccagttgatgacaaaagcgtttccgctttctgattgttcgtttttatagtgggcatacgccatttggaacctgttcgcgaccgcgtaatcacagcagccgaaatctcctaaaacagccgatgtggatgaaaagtagcagatgaaatccggcgtttcgtttttcagccactcgtcaagaagcaggcttccgtttattttcggttcaagcgtactgcggaaattcccgatttcattttcaaagacggatgttctgctttcgatgcccgccgcatgaatgacgccgtgaatggctccgaatcgttctttcgcgcgcttgatgcagtcgcccattccgatcggatcacaaacatcggcttcggcgtaaagaacacccgcgccgagattttccagggatttcattttttctttcttttcttcattgatcggcgaccgccccgtgagaatgacatttgcctggtagttccgggcgagatggcgggcaaataagcagccgagccctcctaatccgcctgtaatgagatatgttccgccggttctgatcctgccgttttctttcgttagtccggttggttcggtgtgatagacatatcgttttccctcttccaagaaaacggtatggtctgtttcagctttcagctcgtcccaaatggttctcatccagtccgttatggccgctccggcttttctgaagtggccggtaacacttgttttcgggagaacaatgccgagcgaacgctcaaagccgatccatgattccaagtagcacctttccagaccggatgcatattcccccgccaataacagcctttccggctgctgaccggtctcagccattgcttggagaatatggacgatacatgaataatcttcgatgcagcttttatcttcaagcgcccataaatacaaaatggcagaagcttcaccgtactctttttgaatatccgcaaaagcgttcacatatgattgcggatcttcccgcaccacttggcagcggctggcggacagagcctcataccggtctccctgagcgataaaaataacgtcaatgtcattgtcatacgatctgatcacagagacggcttcctgctgcttcttctgatcagataagaaagaaatcaccgttttgacttgcttttctccggcagccggcagagcctgttctttaagaacttctctaaaagccattacttcaaattgttccgccggatcactttcatcagccggcgcgttaacgggcgcggccttgctttgtacaggctgctgatgccagaagcgttctttcgcaaacggataagcaggcaggctgatgcgggccggaggacggtctccgtataatttcgcccaatcgatgtccaatccttttacccaaagctcaagcagcttagaatatttccgtttgctgatccaagcgtctatgattgtttccatatcatcatccgccgaaaatacggcaagcatccgtttgttttcttccgtgccgtcacggtgcagtccggcgctgttttgtccggcgataaatccattcagtttttcctcaagttcatgaagtgaatggacgataaaaccgagacgctcttccatcggcacccggcccgtctggagagtaaaggctatgctcataaggtcgctgccgctgtatcttttttcacggatggcgtctctgagctgttttgctttttcagtgagccgttcgctgtttttcgcggacaggacgatgatggcgggctgatctgccggcatctcatcaggctctttgtctgccgtatattcttctatgacgaggtgggcgtttgctcctcccgcgccgaagctgcttaaccccgcccttctcggaagctctttgccgccgatgacgggacgtttccactcaccgagctcctgctgaacggcaaacggcgtatacgcgaaatcaatattcggattcagctgttccgcgtgcagggacggcgcaatttggcggtctttgagctggaatagtatttttgtcagacccgcaatgcccgcggcgctttcacaatgaccgatatttgattttgcggagccgatggcgcaaaactgtttatctgttgtatcctcttcaaatgctttcgttaatccggcgatttcaatcggatctcctaatgctgtccccgtaccgtgggcttcaatataactgacggtgcgcgccgggacgtttgccctttcgaaagcttcttttattaaggcggcctgcgctttcggattcggaacggtgtatccgttcgttttgcctccgctgttaatggtgcttcctttaattacaccgtaaatgtgatcgttatcggcaatcgcccggtccaacggctttaatacgaccgctcctaccccttctccgtcgacaaaaccatccgcgcggtctccgaacgatttgcacgtatcgcctgcggaaagcatgttcatgactgacagattcatataatggatcgggtcggtcactatgtttacgcccccggcaatcgcacattcgcttgaaccgctgtatatgctctcaagcgccagatgaatggccgtcaaagaagaagagcaggctgtatcaacggcaatgctcggcccttggaaatcaaaaaggtaagataccctgttggcaatggaccaatagccgtagcctgtcgggtagtttttgttcatcgcgccggcaaaaacaccgatttttctgctttggcacaggttgtcaggcgtatagccggcatcctcgatactcgcatacgccgtttctaaaaataatcgctcctgcggatccattcgctccgcttccaaaggagaaatctgaaagaacagcggatcaaacttgtccatatcctcaatgaagccgccccatttcgtataaatagagccttctttacctttctcttcatcgtagtaatcctgccagttccagcgttcccgcgggatttcttctatgcagttttttccttttttaatattagcccaaagctcagccgctgtttttgcctgtgggtagcgtcctgaaacaccgatgatggccacgtcgcgaaccgaactttgccggacggtctctttggctgcccgtttttccctccgccgccagtcagtgcgaagcggcttagcaggctgtacagcctgcggttctggtgatgccttccgttctttctgaacaggcgtttgtcccgtcagtttgatcatcgcgtcttttttcgttttgattaagtgagcgacgagcgcctcaatcgtctgatattcaaaaaataaagtgctgctgacttggtccaatacatttcgtaacgcgtttgtcagctgtacgacgacgatagaatcaattccgtatttttcaagcggcgctttcggatcaatttgagccggcggaatttttaatgtttctccgattaacgttttcaagtactcggtgcttttttctgttaaagacgtgtcgcctttttgcaccgttgtttgcgcctgaagttccggcgcatgtgctgcttttggcggagcgatccgttttccggcccctgctttaaacgttttttggcgaacaatgccgttgctttttgccgctataatctgatggcttaattcatgtgccgcttctgccgggaagaagacagaatgccagccttcactttctaacacgcgcttccagctttccggatacaagcccgggcaccccggaatacgaagggcagaatcttcatgcagccaccagccttcaagcagtccgaaagtaatatgcgggaacaggctgtttcccgccatttcatttaagagcagcaaaccattgtcttttaaaacggctttggcatttctcagcgtctggcggatatctttcgtcgcgtggagcacattggccgcaacgacgatgtcgtatgcgcccggctctatgtcctggccggcaagcggcgcttctgcgttaaaaagcttatacgtcagataaggattccgtttgccgtattccgtctccgcatgcacgagaaaagctttcgatacatcggtgtaacagtattcttttatatggttttgatacggcctaagcttttcaaatatgcctgcgcttgtgccgcctgtgcccgctccgatttccagtatgcggatctcggcttttgaatgtttgctgatgttttctttcacataagccgttaatgtatctgacaaggcgctgttaaagtaatccgcgacttgattgtgcttataaattccttcaacaagttccattgaagagtgcgggaacatgatatctgtcgccggcacgtcttcgcgcagaatgtccggcagtgctttaagcatcgtctcggctaaaacagtcatcgcttttgtatcggcgttattgagccattcctctttttcccgctcccatttttgccatagcgcggcggttgtgttttcggctcgcgccgacagtttatatgaatccgcattcccttccagatagccatgttccagaaggaaagcgatcgtttgattgagccattttttaaagtattcgtgttcgggctcatacgctttaaggctttgcggtgtcagcaagtctgcttctttaagctgggcgatcaacagctgatacagaaaatcatcgagctcctgatgttcagcctctctaacaagacgtgcgccgggcggagcgaccttcggctgttgtgaaaagacaagcggctgaggcggataaacggaaatcttttctctttcattcatcccttcgactgcgaccggttttgtcgtatgaatgaaagccgcctgatcaaccggcagcgtcataagggtttcaagcgcctccattgcagcgtccggttcgatcaatcccaatccgatctgatccatcagctgaataaaatccccgtcttcagccgcttcgctgttgccccaatagccccaattcatcactttgaccggacaattccatgtctgatcaagttctttcgcaaatgcgtcactgaaagcgcatcccgcggcataatggctttgtttcacgttatggataaatgccacaagcgaggagaagaagagcgcaaagtcaagcggctcccgtccaaatacctccgccatggacacacttacatcggcttttgcccgcagcaccgatttgaactcttctgtcttcatattacttaagctttgctcagacaaatccattgccgagtggatgattccattcatttttgtgtggcgctcttttatgaactgataagccctctctaaggaagcactgtcggcggcatcggcggaaacatattcaggcgccgggccgaatgcgctgagccggtcgagtttcgcctgtatggaatcattcagtgtgcttcttccgatccaaatgatgcgtgctttgtagcggcggatcatgtattcactccatgcctcgccaagatacccggcgcctccgatcacggcataaaccccgcctgtttggtacagcgtgccgtttttcggcatattgtcaagcggtatcagctgccgctcaaacagctgctgattgcggtacgcccaaatttgaccgtttttcccggcagaaagactgagcgcctcttcgatcggccagctgccgtccgtttctgtgtcaatcatgcggatatgccaatgcggatattctttcgccattgttccggcaagtccgctgactgcggcttgtgacgggtcggcgctgtcttgatccgaaaacggctgggcatttgctgtgacgatgcaccagtccaaacgtttttctccgtaccctaaggcaagtaatgctttcatcagcttgaacacatgaagaacgtttctttcctgttctttgaggctgtccgcactctcagcctgcggagcaagccaaatgatttgctccagttctttttgtccttcaagcatgtgcgtaagagatgtgatatcatccgtacttctgatcggataataggaagcgttcggcagatgttcttttatgcgcgtatgtctcgaacccgttccgccgaatactgccgtctgcttatccgccgctgcttccccggctttttcaagcgcaacaggctcccaagccggaatcagcatcgtatggccgacaggcgcctccgaggtttctccgcccgctgtttggcttgtgtcaagcgcccggacggacgcgcctttcatccggacataaaccgtaccggcatcatcgcacatatcaatgtcaaattttcttacgttgtcatctgctttgctgccttctgtgtaccggatatatgaccagatatgttcaggacacggcccaaacacttccacctcctgcatcgcaaacggcaaagaaagctcgtggctgtctgcatcgtcatgtatcgagcggacaagcagaccgacggaagcgtgaaaagcggcgtccatcatactcgggtgaagcgtatactgttcttttttgtcatgtacggctgctgggagtgaaatacgagccaataatcggtcttctccgatcagcaattgctgtacgcccctgtatgcctctccgtaatccagaccgatcttctcaaaagcaccgtaacattcttccgcagtcacgattcctaaattgcaggaagctttgacagactcgatatcaatctgggcgcttcccggttcggtaatgaccgcttcaccctggctgtgaataaccggatcttcgccgttttctgcctcactgtatatttcataggtaatctcaccattgtcttctgggtaaagggcaatatgtatttccttcggtttgtcttcaatcatgaccggccggacccaaacaacctgtctgagtgtgacgctatggtctttttccgtcacggcagcagcctttttgaccgcctctctggccatttccaaataggcgacgcccggcagtattttttgtccgttgacgacatggtcagataggaaaaattcatctcccgtaaaaagagaggtgaagcgctgctgcgagaaatctgacgtattttcttgtaaaagcggatgcagcactgtgcctgaaaggcttttctcctgttttttctgctgcggaatccaatagcgttcttttgcaaacggataagtcggaacgcttgttttacgcggtttacccgaagcgtacagcttattccaatctactgttttcccttctgcccataactcggcaagccgtatcggatcatccgtctcgggagcggcttcgctcagttccggcagctcggcttgtccgcgccaaagaccggggatgttttcgtttccttttacgaaatcattcagcttttctttcaagtcgcgggtgtcatttacaaggaagacagctctctcctccattgcttcacgtcctgtctgaagagtataagccagttcagacagcaccgtcttttctgaaagcgatcgggctagtttttccgcataggccagaagcctgtctttatttcttgctgacagcgggatgagttttgctgcatcgttctcaggtgcaggcgctttttgttcaggctgaatgtattcttctaaaatgatatgggcattcgaaccggatgcaccgaaggaactgagcccggccctgcgcggataatgtgtgactttaccgttttcttcggctgccggctgcttccacggagcagtctgctgctgtacgtaaaaaggagatccctcaaatttcaggtaaggatttaattccgcagaatgcagtgatttgacaagcgttttgtgatgaagctgcagcgccgcttttgttaacccgctgatccccgccgctgattctgcgtggccgatatttgatttgaccgaaccaatggaacaaaattgctgatcctgcgtcccttgactgaacgcttttgacagaccttcaatttcaatcgggtctcctaacgaagtacccgtgccatgggcttccacataactgacggtccgcgggctgatacctgcttttttcagacaggccttaatgacttctgcctgtgcagcaggactcgggacggtaattccgcttactttcccgacgtggttaacggcgcttcctttaatgaccgcgtaaatgcggtcgccgtcttgttcggctttttccagcggcttgagcaagaccgcaccgactccttctccggaaacgtagccgtccccgccctcgccgaatgtacggcagcggccgtcacttgagtgcatgcccacgcttccgtagctgagatatttcgccgggtgcagcgacaagttcacccctcccgcaagcgcggcctcacattcgccgcggcggatgctttcaatggccagatgaacggcggtcaatgatgaggaacaaacggtatccaccgcgatgctcggcccgtggaagtcacaataataggacactctgttggcgatctgcgcataattcagtgaaaccggaaaaggatcagtttcagataattgttctgcgccgattaaggaataatctttatgcatcacccctgcaaatacgccgatcggatgctgtttttcccctttattccccagcgtttcaggcgtataccccgcatcttcaatcgtttcccagcatgtttctaaaaacaggcgctcctgcgggtccatcgtttccgcctcacgcggtgagattctgaaaaactgcggatcgaagcagtcggcatcgtcaatgaaaccgccccattttgatactgtttttccagacggggacgttacgttttgatatgttttccaatcccatcgggacttcggaacttcagtgatgcaatccgtgcctgccttcaggttttcccaaaactccgccacacttttcgctttcggatagcggccggccattccgataatcgcgatgtctccggtgtttttatgatgttctggcgcgtccggtgcttcagcttcagaccgttgtggttcggctgcacgttccgcacattcaaatgaaacggtctttttcaaaaaggctgcgagttcttttatatttgtatattcaaagagaagagtgggcgcgaggtccgcacccgtctttttactgatatcctgtacaatctcaagcaaagaagatgaatccagcccaagctcgtagtatcctgcaagaacgtccagcgtctcccaaggctgcccaagcttatcagccaaaagcttctttaaaaacagaatgatgtctttttcatctgcgctttccggctcagttgcagcctgttgattctgttcggctgtattcgcgtcttcttcgagccgaaccgcttttcccgtaatgtttttcagctccgccaccttttgtccggatcggctgaagtactcgatcgtcatcgttgtgagttctttttcctgacggacgccggaagcggcgatacgcgccgtgcactcagattgcagcctgtcggcggccgtgaacgattcataatataaaggcagatgaagccggtttgtttcagaaagcaaaccgctcgccccgattccgctcgcatccaaaagtgccggatggaataaaaagaaatcttttccttcttcgcaagaaagctcagccagcattccgccttctgtttcgtacaatcgtccgttcgatttcatcatgccggaatgaaccaagtcatgatccaggcatcggttatacatgtcatcaagattcagagatctgcctgactgcttcacatcgccgaaatcaatggtttcgtcaaatgtcacagcgtctcttttcaccatttcagccgtcgcatattgtatattgtctgacagctcgtcaccttgctgtttctgccctgaaagggagatgagccactttccatctccgctatcagaacattgaatggtcagaatgatcgcagccgtttcactgacggttaaaggctgataaatcgtaacgtgcttcaattcgagctcattgtatacataaccgtgttcctgaaaaacctgataaatcaaatcgatataagcaagaccgggcaataccgcttcaccaaagaccatatggcccttcatgatgggatgatccagtgagatattgattttttccgatatcattccttcccactcctctctcatttaaatgctttccagaacatttttttcgcaggaagctcttgtttctccgctagtacgtcaggttcttttaccagagccttacgtcttaatgacggtaccggcagcggctttcttttcattcgggtatctttttcttcccaagcttccagaatgacgtgggcgttcgttccgccgtcggcaaagcagttgatggctgctgacggtctggctgcatcccattcaccggctgttttatgaaaatgaaaatctgtctttgttatatcaaaatgcggcatcggttcatctcctgagaggaacggaaccgtttgtttatgcttcagcattaatacgattttaatgaagcttgcgatgccttctgcgcaaagcggatgcccgatgttcggcttaattgacccgatgccgagcggaacatgctgacctgagcggtatacggattgaatcgccttcagctcaagcaaatcagtgaccgcggaacccgatccgtttgcttcgatataactgatgtcttccggctttttgccgcttttgaaaagcgcgctttgcatgacgtctttttgcgcctgcatattaggagctgacgggcctgccgttctgccgtcattgttcatggcggcggccttaatgaccgcgtgtatcgtgtcgccgtctttttgcgcctggcttactgtttttaacagcaccatgccgacgccttcaccgaggacaactccgcctgaacgcttgtcaaatacgtgaaatgccggtttttcgtttaacagcccgcgctcttggaacatccggtgcgccgcatccgtgttcagcaggctgacaccgccaactaccgccgctttgatatcgccgcttctcagtgcctgaacggccatgttcattcctgtcaaagccgatgaacaagccgtatcaagcacgatgctcggcccgcgcagatcaaaaaattgcgaaacgtttgccgctaaataattctgcccgcccgcaacgatcgggttgcgggtattcgcaagaatttcaggatcaggctgatgctggctgcggcctccgatatacacaccggcttctatgcccttgatttcttcacgggtatagccggcatggcaccaaagtttcaagctctcttccaacaccgccaatgcctgaggatccatcgctttcgcgtcgttttccggaatgaaaaagaattcggaatcaaagtgatccatattgtcaatcaatcccgcaacgtattgatttgcatatccgaaacgttccgccgggactgagccgattgcggacctgccgcgtctcagcaagtcccaatattgttctaacgattccgctcccggaaaacggcagctcattccgacgacggcaatgtcttcagttacggcatcacgcttttgttcagtatgaaccgtttgtacggcagccggaaccaagatttctgtatcaggttcctccctttctgcaagcagcggctgtccattggatacaagccattcggcaaacgcgtcaatcgtcggatgttcatataaaacagacggatctaagtcctctttgagcgcttgattcatttgctgtaaaagctgcgctaaaatgatcgaatcaaccccgtaatcctgaaacggttcgtctgtttccagttcttccggagcgattttcagctcatcggaaaacagtttcacaagccacgccttcgtatcaataagcagttctctgtctgaatgtttttcagcggctttgccggttattacggctttttgtgttttctcttgacagagcagcctgtcaggatgccattcgctccgatcaacgatagccggcagaacggacgggcggatgttttcagataaaatacgatccagcaagtcaagtccttccgcgttggacagtcccagcagcccggtctgcttcaggttttctgtgcggacttcacccaatccggtttccttccagttcggccattgaatgctgactaacggatattgatgctgatgagccgccgcgaaataatccatgtacgcatttgccatcgcataatccgactgtcccgccgcgagcgccggaacgactgcagatactgaagaaaataagacaaaaaattgcaaaggatcatttgtgaaaaggctgcttaatgtttgaagccctgcgactttcggttccagcacttcttgtatgtcgtcggcagtctttctgataaatgccggatttactgaattaaccgatcccgcacaatgaatgacgccgccgatcggtcccatcgtgcgccggatcgtttcaatttccgctgccgccgcatcatgatcagacaatttcagactgatcaccgccacttgcactccttttgcttcaagctcttcaatcgcccgtatcttctctttcagcctcgtcttaacggctgaacgtttatgacggggaggaatcggctccctgcctgtcagcactacttttttcacgccgtgtttttctgtgaaatggcgggcgcataagagacccagtcccctcgtgcctccggtaatgaaaagcacatggtcttcaggaaacggtgcgggcttatgttctgctcgcttcccgcttggaatctccctgaataaagcacggtatctctgtccgtttcggcggcagatttccggttctgtgcagtccgccgaaaattcatctgcaatctgtttggcaagcgtctgctgatccgtatctgtatcggcatccatgtgtctggacgtcacgttttgatactcattttgaagcattctgtacaggccgctttttgccgctcctgcaagatgaatcgttttctgctgaaatggttccaagccttttgttacatatagcagcgtcagcggccgcgcttgccggcggcttgtatcaatcagagtctggagccggctgatcccttccagtgaagggtcttcgtctccgcatcccgtcagatcgattgcgccatctatgtgattccaatcgctagctgcagtgtcagccgaatcgaccaggagaatgaatgagtcagcgaaatgctttgcagtctcttcggctagctccgctgttcttgcatcagccagaatcatgaccgtcctgccgcttttctcaccggccgaatcgatctcacacggaacccattgcttttctaaaagcacagcctcgcgccggtcttctgtttcctgcggtacggctttcggctcaggcagccagtacggctccttcgcaaatgggtaagccggcagactgattctgcggggtttttcgccttgatagagtctgtcccagtccatctggagccctttgacccacaattccgctatttcggcgtattttttcttatcgaaccatgaccttacaagctgcttcaggtcatcgtccgtttcaaatgctttgatttcttttttagccgttttgatatgggcttcatatatcccttcacccgtatttccgtttacaaaatcggttaaacggctgatcagttcttctctcgaaccggctgtaaccgcaagacggtaatccatcgcatcacgcccggtttgaagcgtgtatgccatatctgaaaggttgatattctgattggcttttgcaaattcgatcacagactcggcataggtttttacctgcagcgcttttttcgccgacagcacaaaaatgtttgtctcatcaggcttacggcttccccggtctttcggctgatactcctcgataacgagatgagcgtttgtgccgctgtagccgaatgagctgacacaagcccgccgcggtgctccgcctgtttcccaaggtttgagttcggtattgacaaataaaggcgagtcatcgaaatcaaaatgttcattcggcgtgctgaaatgaagggtcggcacaagctgctgatgcttcatcgacagcagaaccttctggacgcttgctacacctgccgccgccgacgtatgcccaatattcgatttaaccgaaccgatggcgcaaaattgtttgcggtccgttttttccttaaatacagaagacagggcttctaattcaatcggatccccctgctttgtgccggtgccgtgcatttccgcataggtgatgctctcagggtggatgttgtgcgcttcatacacttggcgctctaaatccatttggcttttcgcgcttggtgcggtaatgccgttggtttttccgtcctggttaattccagatccgataatgactccgtaaatatggtcttgatcggcttccgcatctttcagcctcttcaaaatgagcgcccccgcgccttcgccaggcacaaatccgttcgcactgttatcaaatgctttacattggccgtcaggagacagcattcctgcttcacacatgctgatgtatgattcaggcgttaaatacaaggtgacaccgccgacaagcgccatgtcaatttcatgattcaacagcgcctgacgcgccaaatgagtcccgacgagagatgaagagcatgccgtatcaatcggaatggccggccctttcaaattgagataataaggcagacgtgccgccgcgatgctgaaactgttgcccgtcgcgcttcctcctgtctgatgtttgtttaacatcatgccgtattcattgttcataatccccaaataaacgccgcaatttttcccgtttaattcttttgagctgtaacccgcatcttcaaaggctttaaaaccttcctgtaaaaatatccggtgctgcgggtccataagttccgcttcagacggagatatattaaagaacagcggatcaaactcttcaatgccgtcaagcataccgattgatctgcagtatactttgcccttcttgtttaaggccggatcatagtatttgtttacatcccagcgggaaagcggaatgtcgcgaatggcgtttttcgcacgggctaagttgtcccaatacgtctttaggtccggcgcatccgggtactttcccgacatgccgacgatggctatcgcgtccgctatctcgtctttatgctcccgtttggcctgcaccggttcaggttccttttgaatcgttaatctctccggctcggcaggtgttttctcctgcggggcatgttgctgcgtaagcggctttggacgtacgggaaccgcctgtttttttctgccgcggacggacggctgcgtacgcagaaaatcggcaaattgacggattgtcggataatcatacactttcgttacgttacagtccgtgccgtaccgtttattgacggcctttatccattcaagaccggtaatcgaatccatacccaagtcaataaaggcctcatcaatatctacttcatgccgctccatgtacaatacatcagccagtgcttttgataactcgtcatgcaccgcttcaatcggttcttccggttcggcggaagctgccgtttcagacatcgcctccagaatatccgcttctgcttgtgtcacatgctgcttatgagcgtttaaaggctgcagcatgatgtttgacggttttttcacggcctctgatttctgcggttcggttgcttcctcaaggatcggttctgtcccgagctctttttgcaagaaagccgcaaactggcggattgtcggataatcatatactttcgtcaccgtaagggacgtgccgtatgctttattaacagactttatccattcaagaccggtaattgaatccatgccgatatcaataaatgtgtcgtctgcgtcgatatcgtcggcatccatatataaaacgtctgccaaactttcggtcaatacggcacttactttttcagcggaaaccgccggacgggaaacagactgtacggttcttttcggtttcgcgccgctcaaaggctgcagtgtaatatttgacggtttttctttgacagtctcctcgtgaagagttgttacttcaatgaccggttccggggcggccgccggtgcgatcggcgcagactgtgtttcggccggtcttttgacagctgcatctgctgatatgtcgatccaataacggtcttttgcaaacgggtaggccgggagactgattttttgcggtctgcccatttgatacagcttatcccaattcagcggaaggcccttcacccaaagctctaatacctttgcggctttgcctttttcaagccacgcctcaatggttttttccatgtcctcatcagccgcaaacagcgccatcgtgtctttattctgtttgacttgtccccggtagagctggtcaattgactccttgccgcccgtaaattcgtcaagcttctcttcaagctcgcgcaaattgctgacaatcattccgagacgctcttccatcggttcacggccgatttgaagcgtatatgcgatccggctcagatccgcttcccggtaacgcccgctccgcagtgcatcaagaagacgtttcgcccgtttttgaagccgtttctcattttttgcggaaaggacgatcatcgacggatgaggcgcggcaaaagccgtctccttatcctcatcagcggaatattcttcgatgacgatatgagcgttgacgccgccggctccgaatgaggaaagccccgcggttctcggcagttccttatcatttatgaccggtcttttccactcttcaagcgtctgctgcactttaaacggcgtagcgagaaaatcaatattcggattaagcgtccgggaatgcagtgacggtgctagctgcttatgtttcatttgcaggagcaccttcgtcagcccggcgatgcccgccgcgctttcacagtggccgatattggatttcgctgagccgatggcgcaaaactgtttatcttgtgtttgttctgaaaaggcttttgtcagacccgtgatttcaatcggatcgccgagtgaagtcccggtgccgtgggcttcgatgtagctgaccgccctcggatcggttcccgcgtcttttaacgcctgtttgatcaccgcggcttgggcgttcggattcggtacggaatacccgtttgtttttccatcatggttcacggccgttcctttgatcagaccgtaaatatgatcaccgtccgctttcgctttagaaagcggcttaaggagtacggcgcccactccttcaccgggcacataaccgtctccgccttctccgaaactttcacatctgcctttgcttgataaaaatctgttctggccgagcatcaaatatttattcggatgaacggatacattgacgcccccggcaaatgctgcttcgcattccccgttccgcaagctttggcatgccagatgaatggctgttaaagaagaagagcacatcgtatccagagccatgctcgggccgttaaaaccgaatacataggaagccctgttcgcaattgatgacggatttccggtcagcgcaagcgattttccgcgcgcctgttcttcggctccgtaaagctgatattcctcgtacatgacgccgacgtaaacaccgacattggcgccaagcaaatcacccgatttttccgtgagctttttgcgcgtgtaaccggcatcttccatcgtttcgtagacacattgcaggaataaccgctcctgcgggtccatcaattttgcatcccggggcgaaatagagaagaattgcggatcaaatttgtccacgtctttcaaaaatcctccccattttccgtacgtcttgccttctttatctttatcagcgtcgtaataaagactgtgatcccagcgatcgtttggaatttcggttatgcagtcagtgccttcactcaaattcttccaaaattcctgaagattttcggcctgcggatatcgtcctgatataccgataatcgcgatatcttcacgctctgtcagctgctgattttcccgcgtttccggacggacttgcgcaaagccttttttgccttcattccgtttgaaaacgggctttactttctctttctcagacagcgcaggtttggctgcaggggcttcttctgttttcatcccggtcacttccagcagcgtgtcccggtgtgctttcataaaatactgcgccagcgattcgatattctggtactcgaaaaacaatgtttttgataatgagccgaagctcttttccagccggcccgtcaaatgcataatcataatcgaatcaattccgtaatcttccataggcgccttggcatcaattttgccgacaggaagtttggtcacttccgaaagcacttgtttcaagaaatgctccgttttttctgcaagcatgttctctccgcctgctgtaagacccgccggttcttcggtttcgctgcccttatccggctgatcatccgctgattttttcagaaacgcccggatttttgcggcgtagccttccgtcaccatgacttgggatgtgtttgccgcccacccgcggtataaagcctgaatgccgttttctgtttgcatagggaccatgccgctttcttttgtcagcatggcttccgtttcagcatcaaccgtcatgccgccgtctttccaaagcggccagcagattgaaagggtgtgtccatagcgttcatttcgggcttttttacggtttcttttttcactgaaggcgttcataaacgcattggccatcgcataatcagcctggcccgcgcttccggcgcttccggctccggaagagaaaagaatcagaaaatcaagctcaatgtcctttgccgcttcatcaagatgaaccagcccggagactttcggcgccagtacatcacggatttcatctttgtgttttttcagaatatagttgtcttttatcgttccggcgctgtgtatgataccgtttaatccgccgtactgccgacagatgtccgctgtgagcgattgaacttcttgtttttccgtcatgtccgtttgtttgtacacagcttgcgcgccgagatcggacagttcttgaaactgggcttttttacggttatccaacagagaacgccccgttaaaataagaacggcgtcttttgcatgccgggcgatttctctggcgaataaaaatccgagtccgcccgcaccgcctgtgatcagataaacacctttatccttccacggcttttcggcgccgaactgttcaagacccgtttcctgccattgtgccgtatagcgcctgccgttttcatagcgaatatgcttgtcatcaggatgagcgctgcattcacttacatatcgggacagaatgtctgccttgacgtccggctccaattcaatcagctggccggtcaggttcgggttttcaagcgccgctgttttcaaaagccccgttaagccgcaaaggagctgcgtatccgcttcttgaggcacgacaatctgaatgagttcgcgcccgccggaatttgaagcgaggattttcttcacttcttcgaacgcctgaagcgcacaagcttcaaaccgttcgtcttcactcttatgctgatcacggagcacatgacagctgaagtctgtctgtatgctgttcatttgatccgtaaaccggtcagatatcatcacgtgacgggctttgaaatggatcggcgcttcttcatgtacagcggtcttctcttcccatacgtgttcaaaatatagtgtatctgttttatccgtttcaatttcccgtgcggaataaccagtcattttcacacatacattgccttgttcgtcacatacatcaatatccagcttctgcacggcatcttcaggcttgctttcgccgctgtacgcaatggaaacccacatattgcttttacagcttttcaacacatcaatctgttcgagagcaaacggcagcatcggccgtatgtcagtcccgtctctgtcaagcattaacccgattgtcgcgtggaaggccgcatccaaaaggctcggatggaggacaaactgatcttttgtatgagaaatagatgacgggagtgagagcttcgcgagcactttgctgtcttttgcatagatttccgtgaccgctttgtgagcatccccgtattcaatccccatctgtttgtatgcctgatagcaagcgtcaggtgtgatcagacggcgtgactctcttaatttgtcaatctcgattttggccggttcgcccgttcgggcaaacgccgcgcttccttgcgcatagagaacgggctcttgttccgaggaagccgattcactgtaaaccgtaaatcccatctccccattttcttcgtcataaagacggagatacagttctgcggactcatccgccgctgtaaacggacgtatccatacgacatgtttcagccggactgttccttcttccttcgtttctgccgcatgttccacggccgcccggaccatttccagataagccgcgcccggtaacgtccgctcgtttttgacgacgtgatctttcaggaagaattctccgccgctaaacgaggaccgaaaacggacgcctgacatgtttgatacattttcatgcaggagcggatgcagcatgcctgcatttttttgcggcagcgattctcttttctccgccttcggcacccaataccggattttttcaaacggatatgtcggcaggctgatccgattcggtttgttttcaccgtacaagagattccaatccatcgttcctccgccggcccacttttcggcaatcatctccagtctcccggaagaaagccatttatgtatcaagtccggagcaagctctgcctgtttgcttttatcggctcggttccgccagcacccgctgaccgttttacccgccagaaagccttccagccgctctttgagctgtgtcatatcctgagcggtgaacgcaacccgctcctccatctgttcacggccgatctgaagtgtatacgccgcatcctcaagcggcaggccgggatgaataaatgcagacagcttcgcaacgtactcttttagccgttcttcattccgggctgaaaccgggaaaatgaatgtctgttcttctgccggttcagcatttgttccgtgtgattcttcagggataaattcctccagaatgagatgcacgtttgaacctgtcgccccgaaagagctgatgcccgcacgccggggatatacggtttcggttccgttttccgtcactgatggctgctgccatgcttcggtatgatgctggacgtaaaacggtgattgttcaaaatctaaatacggattcagctcctccgaatgaagagacggcaccaaagttttatggtgaagctgcagggcaaccttgcttaagccgctgatgcccgcagccgattccgcatggccgatattggacttcactgatccgatcgaacagaactgtttgtcctgtgtgtactggcggaacgccttgacaaggccttgaacctcgatcggatcgccgagagaagttcccgtcccgtgcgcctcaatataactgaccgtgcgcggatcgatgcccgctttgtccaggcattcttcaatcaaatcggcctgcgcgacaggactcggcacggaaattccgctcactgtccccacgtggttgacggcactgccctttatcaccgcataaatccggtctccgtcttttaccgcctctcgcagcggttttaataaaacggcaccgattccttcagccggtacatagccgtctccgtctttcccgaatgtatgacaaaccccgtctgttgaaaacatgtcccataaaccgtatgtcagatatttattcggatgcagcgacaaattgacccctccggcaaccgccgattcacattccccgcgccgaatgctttccgcagcaaggtgaaccgcagtcagcgaagatgaacagaccgtatcgaccgccatgctcggcccgtgaaaattgcaaaaatatgaaactctgtttgcgatttgcgcataattaagagaaagcgggaatacatgatcttcagaagaagcttcagccccgaccaacgtataatccttatgcatcacccctgcgaagacgccgacgcgctgtctcttattccgtccgcgcgcctctgcgagcgacttcggcgtatatccggcatcctcaatcgtttcccagcatgtttgtaaaaacagccgttcctgagggtccattgtttcagcttcccgcggcgtaatccggaaaaattggggatcaaagcaatccggatcatcaataaatccgccccattttgaaatgctctttccggaaggcgactttacattttcaaaccggcgccagtcccagcgagactccggaatttcggtgacacagttttttccttctttcaggttttcccagaattcatgaatattttcggcctgcggatagcggccggccatgccgataattgcgatatcttcatctagcggcacactgcttttccgcctgttttctgtttgcggctcaaccggcttctccatctttgccggagacgcgctgaaatggctcccgtactgctcagtcaggaaagctgccagctctgctgccgtcgtatattcaaacagcaaagtcggagaaagggtttcgccgattttttcgctgatcgtttcgacgacgtcaagcagtccggacgatgtcagccccatttcatagtagccgacttgagaatcaatctgttcaagcggcttgccgattttttcagccatcagattcatgacataccgttccgcttcctcatgcgggtgtccgccttcaagcgatgccgcaacttccggtaaaccggctttttcaggagaactctcagcagtctttcgttctgtattgatcagctcggcatcccgcacgagcttgcttgtgaaatctttcagctcggctactttccggccggatgcgttaaaaaactccagtgtaatgtaaatgagctccttttcctgccgaagcgacgaacgtttgattctcgtgatgcagccgctctgcaaaggttcggaagctgtaaaagattcgtagaaaagaggcagaaacagcctcttttccccatttaacagcgatgagatcaataggtttgcgccgacgccgcttccgtcaagaagagtcggatggaacaaaaaccctccggcctgtcccatcgcgtcttttccgagcgatacatcaaaggtgacgccgtcccgctcctcaaacacttctccttccgctttcatatatccgctgtgaaccaattcctggcttctgcattgtgcataaagctcatttaaatcaatggtgcgttgcgcctcgcgtttgacagagtcaagatcaagcgtttcactgaaaattgcaggtgctgtctcgtgcatttccgctttgacgtaaatacgttcttccggctggactcgtccgccgctgacctcagccccttttgcggtaagtttccagcgcccttcttttacctttgtacattcaaccgtaagcttgacggcgctgtcttctttcgcgataagcggctgatatatggataaatggcgcagctgaagcccgtcgtatgaatagccgcgctctttgaaaatctgataaaacatatcaatataagccaatcccggaaggactttttgtccgtaaacgtcatgatgtaaaataaacggatttttcagcgataaagtgatttgcttattgaagttcttcacgttaaacctccacttcataggtatcccagatgtttgccgcagctttttcgttcgtttcttctttgctgtccggcgaaatcagccgcttatttaatgcaggcggtgttaaaggatggcgcttgattcggcgcccttcgtcttcctgccacgcttccacaatgacgtgagcgtttgttccgccgtcggcaaagcagttaattcctgccgccggcattggtgacggccagtctgccagagtgcggctgaactgaatattggccttttctctatcaaaatgtgtattttcatgctcgcctgataaaaacgggataaagctcttttctttcagcatgagaacaacttttatgaaacttgcaattccttcggcgcaaagcgggtgcccgatgttcggtttcacagatccgattccgagcgggccggcgtcttttgaacggtagacggattgaatggccttcagttctaacagatccgtcacgaccgtgcctgaaccgttcgcttcaatatgagtaatgtcttccggctgttttccgcttttttcaagagccgtcttcatgacggatttttgcgcttccagactcggcgtagccgggcctgccgttcttccgtcattattgacggatgccgccttcactacggcataaatagaatctccgtcttcaatggcctgagacacggtttttaatagaaccattccgacaccctcgcccagcacgactccatcggcgcgttcgtcaaatacatggaacgactgcgctttacttaatatgccgcgctgttcaaataatttatgggtttcttctgattcaaacaggctcacgccgccgacgacggccgcttttatttctcctgttacaagagcctgcacggccatattcattccgactaaagcagaagaacaagccgtatcgaggacaacgctcgggccgcgcatatcaaagtattgagagagattggcggccaaataattctggcccagcgcgacgatcgggtttttcgcgtccagcagtttctcttcacccggtctgtgacggctgcgtccgccgagatacacacctattgcttctccctttatctcatccggcgtatagcccgcgtgatgccacaggttaaggcattcttccagagcggccaaagcttgagggtccattgcctttacatcttcttcagccagtaaaaagaagtctggatcaaattgatgaattccatcaagcattcccgcgtaataaggcgtcttcaacccccatcgctcagccggaacaggaccgatagccgaacggccttcagccaaaagcgaccagtacgcctctaaagaagccgctcccggaaaccggcaggacatgccgacgaccgcgatatcttcccggtgaatctgttttccggccgcctcttcttgcaccttaacggcttgtgtttcaatcaacggctcagccggcttcttcttaacaggctccgccgtcgccaaatcaaaccgttctgacaaaacttctgtatatccttcgagaagccaatttgcgaaagattgaatcgtcggatattcatacagaatggacgggtcaagcgatgccgagagattccgattgatccgctgcagaagctgagcaagaataatggaatccactccgtaatcttggaataatacgtctgtctcaagctgatcctggtcaatccgcagctcttcagaaaataattctttcagccattcttctgttttccttgttaattgagcgttgtctgcggcagtataagcggttttttccgccggttttaccatagctggactcattggctgatcctgcctgctccgccgcaggaatcgctccggcttccacagcttaggattcagaacggccggcagcaccgggccccttgctgattcaagaagtatgccgtcaaggagctgtaatccttctgcattcgtgatgctgtatagcccgctctctttataagctttgttcgttacttcgcccattccggtttctttccagttcggccactgaatgcttacgatcggcagctgctctttgtatgagtttgcaaaatagtccatatacgcattggccatggcatagtcggcctgtcctgccgaaagcgccggtatcgcagctgacacggaagagaacaagacgaaaaacttcagcggctcttcgctgagcacactgtataacgcctgaagcccgtctactttcggctcgagcacgcgctgtatgtcttcatcggtttttctgatgaatgcgagcgtctctttatcggtcacacccgcgcagtgaatcacgccgccgataggtccgagcgtctgttttatctgactcagttcctgtctcagcccggcttcatcagctaacggaactgacaaaaccttcacttgtacacctttggattccaagtcgagaacggcttcaattttcgcttttacagaagccgtcaccccattcagtccgcccgtccactcacttcgcggcggaagggtctcgcggcctgtaagcaccagttttttcactccgtaatgttcggcaaaatggcgtgcgcataaaagaccgatccccctcgtccctccggtgatcagaagcacatggttgtccggaaaatcaattctctcgccttgcatattcatattttctgagccgcttaatacagcgcggtagcgcaagccgtccctccggcaaacttccgcgtcatcagtgcgagcatgaaactcatcggcaatctgcttcgccagtttgtcatccgaaagcgctccttcaaggtcgagatgccttgaagacaggtgaccgtactcgcatgccagcattctgtacagaccggcccgttttgctcctgttgtttgattggcttctttatctagtgactcaaggtctttcgtgacacaaagcagtgtcatcccttctttatgcccatgctcaatcaattgctgaagccatttgattccggccatgtcttgagaatcttctttcgctgcgccgaggaggtcgatgactccgtcaaacgcctgccagtcatattcaccggtaaggtctgatgcggtgatgatacggtgattcggcatgtgcgctgcgatctcttctgctagattgaccgtgtccccgcctgtcaaaatcgcaacggaacgtgggcacggttcacccagttcgagcgggctcagttcccattgtttcgtcaaaatacgtttcatccgttcctctgtatggaccttctttttgtcaggattctcaggcacccaatacgtgtcttttgcgaacggataagacggaagactgagtaaacgcggcgtacccttttcatacagccggttccaattcaatacgccgcctttcacccatacctctgccagcttggcgaattttccttttttaatccaggcgtcaatgacgaggtccatatcttcatcggccgtgaacaaggcaaacgtatctttattgcggtgagactggccggtatacagcccggcgatgtttttctcatttttcgtaaatgcttccagctttgtttccaattccgccatcgtcgctgcaagaatggccaagcgctcttccatttcgtcccttccggtttgcagcgtataagcgacgcccgccaagtcttgatctgtatacggcgtttgacggatcgctttttgcagctgctgcgcctgttcaaacagtttttcttttgatttggcggacaaaaggatgattgccggattttccgggctgtgctcaggctgagcggctgctttcgggacatactcttcaatgatgatatgggcgttgaccccgccgatgccaaatgagctgaccccggcccggcgcggaacagcatttccgtttctatcttttgctgccgtccattcctgattttcctgcacgatgtagaaaggactgtcatcgagctgaatgtacggattgatcgtttcgcaatgcaggcttttcaccagcgttttgtgcttcatttgcaaaagcactttcatgacgcctgatactcccgcggcaagctctaaatggccgatattgcttttgaccgaaccgatgccgcagcggtgaccggagacttcgggctcttgatttgttttcgccagctcgtgaaacgccgctttcagaccatttatttcaatcggatcgcccaattccgttcctgtaccgtgcgcttcaatatacgtaacggtgctcgggtccactcccgctttccggtatgctttcaccaataaatcagcctgcagtttcggattcggcgaggttaacgtattcgcccggccgccgtggttttcagccgtaccgcggatcacaccgtaaatcggattgccgtcacgttctgcatctgtcagtttcttcagcatcagaattcccgcgccttctcctctgacatacccgttggcatctttggagaaggttttgcattttccgtctttgctgagcatgcctgctttgctgtagctgatatgcgcttcttccgtcagaatcgtgttgattcccccggcaatcgccatgtcgcattctccgttttctatagcggataccgcccggtgaatcgccacaagcgagcttgaacatgccgtttcaatcggctcgctcggcccgtgaagatttaacaaatagctcaaacggttcggacctatggaaggaatcatgctgcctgtcgccgcatgtccttccggcgcaagacctgcccttatgaacaaatctttataaccggtatttccggttccgataaagacacccgtatttgtaccggaaaggctttccggcttacagcccgcatcttctatcgcccgccatgcataagtcaataacagccgctgctgcggatctaaatattgggcttcccgcggtgaaatcccaaagaacagcggatcaaattcagctattccgtcgataaagccgccccacttgatattcgttttattcccttcaagattcgggtcgccatcaaacgcttgccaatcccagcgttctttcggaatggttgtgatcgaatcctttccttctttcaaattgcgccaaaattcctctatatcctttgcacccgggaatcggccgctgattccgacaatggcaaccgggtccaagcgtcgcggctcttgtgtcactgccgcggcgttcattaccgttgcgaagcgctttttccgctgcattttcggtttttgggcttttggctgctcttttttccgagactctttcttcttttcgccgaaacggcccggatgctcttttgccaaatatccggcgagaccgctgatcgttccgtactcaaagaaaatcgtcggcgccagctccagctgatacgcttcatttaattgattcgtaaagacggtaaacgatacggaatcaaaaccgtattcactcaattccgtatctgtctcaatgtcctcacggtcaacttttaaaatgccgcttaccatggctttcaaagcggtgtgaagcgtttgaagagattcttctgcatcgtgtttttcttccggctgagaaggaaggccggcttctgcctcatccgtcaaatactctgctaaactgcggatcgtcccgtgttcgaagaagatcgtcggcgccagctccagctgatacgcttcatttaattgattcgtaaagacggtaaacgatacggaatcaaaaccgtattcactcagttccgtatctatatcaatctcgtcttggccgacttttaaaattgaactgaccaatctgataagcgcaccgtgccatttgtctcccgaaacggcggatacaggctctattttctccacctgcggcttttcagtttcagaaacggacaggaacgactgttttaattttgctgcgtgtccttcagctgctaaaagctgcggcttttcctgagccattccttcataaaatgcagccaggcctgacgccttttgaagcggaaccatgccaaaagcttttttcatcattctctccgtctcgtctcccgcctgcataccgccatctttccacagcgtccagttaaaggcgactgtttttccgtgccgaaggccattctccgtaagggattgcctgtaagcggcgtatgcatccataaacgcgttgccggcggcataatcagcctgcccgacgttgccgagaacgccggaaacactggagaacaatacgaaaaagtcaagattgcagtctttgctggcttcatctaaataagcggttccattgactttcggatcaagcacttccctgaactcttccttcgttttttgcagcaggaagcggtcttgtatcactcccgcagcgtgaataattccgttaagctttccgaattccgccgtaatctctttgatcagcgcttcattttcccgccggtccgccgcattcagttttttgtagacgacatttgcgcctgagtgctgaagcatagcaagctcacgctgtttggcttctgccagatttgagcggcccgtcagaatgattttcgggtgttttacgcgacctgcgatttcttttgcgaacatcaagcccaggcttcctgcgcctccggtaatcagatatacgccttcgtccttccagacgatgccgccccctgcgggatgcatttcttcccaagccttcacataccgtttttctcctttataacggatatgtttatcctgcggccgatgactgtcgtttttcagtttttgagcgacagccggcatttcgccgattgattccatttcgatgagctgacagtcaagttttccgtattccagctcggctgtttttaacaaacctgttaaccccgcaaacaattgctggctgccgtctgctgaaataacggtctgaatcagaatgcggccctgccttttttcgctgatgatccgccggatgtgctcggcgactgtctgcgcatagctttggaagcgttcagcggctgtttcaccctcaccttctgcaatcagcagttcggcgtctttcaggccggatgccgcttcatcttttatacggcaggcatcttcacaaagtatgatcaaatgctcatcagcatggacagaagctttctcggatgcagcggcttctttccagaccggtgcaaacaagaccttttccgagcctgatagccgctgagccgattctgcatcgccttcaagcactctcgtagagaatcctctcaccttcacgcaaagcgctcctgtttcgtcgaacaggtcaatgtcggctttctgcacggaatcaccggtttgatatccttcactgaagcgtgcatgcgcccgcatagccggtgtgcatgctttgatgacttcaagatattccaacgcaaacggcagaatcagcttttttccggaaaactcctgcataatgcagatcgtcgccgtctgaatagctgaatcaatgatgctcggatgaagcgtaaattgtccgttcgtgtgagaaacagaatccggaagctgtatgtccgaaagcacttctttctcgccgataaaggcggacttaatgccttggaaagcctttccgtggaacatccccctgctcctgccttcccgataaaaggccgccggatcaagaatgtccgctgtgcacctgttttgtatggcagaaaggtcggcctcaggctctcgttcagcctttatgatctcggcccgtccttggctgtgcagcacttcttcgccgtcagcgtttacgctgtaaatgtcatatgagatgatgccgtcctcttcagggaacagcgcaatatggacttggcgctcttgttcgtgaacgacgatcggcttcatccagacggtatgatggagcgttattctgtcttggtcttttaataagccgccaagcgcccgttttaccgcttcataagacatttccaaatatgccgctcccggcagcaccgctttttccctgaccacatgatccttcaggaaaaattctgagcctgtaaaccgtgagctgaaccgctgaacggccaaatctgacgtattttgctgcacgagcgggtgtaaaactgagactccggtgtgtgcggctgatgtgttcttttctgcttttttcggccagtacggctcctttgcaaacgggtagaccggcacgctgattcgtttcggatgcttgtctttgtaaagcttgtgccaattgattgcgacgcctttactccacatttcacagagcttcggtccttttcctttcgcaagccatttctcaatgagttcagcgctgtcatcatcatcagaaagccaggcaatatctttcgcctgctgtttttctcctctgaagcagcctgttacagccggcttatcattgataaaatcggcaagctgccgcttgagctccgcaatgccgcttgtgataaaggccgcgcgctcttccatcgcttcccttccgacttggaacgtgtaggcaagatcagcgaggtctgtgtccgtttttctttccagaaaagccagcagctgttttgcgtactccttcagacgatctttttttctggcagacaacggaatgatgaacggacccgcagcgtctgctgcttcggatgcatccggatattgttcaaaaatcgcgtgtgtgtttgttccgccaagaccgaaagagcttaaagccatgcggtgcgctctgttctcacgggttaactctttcttttcttccgctacgtaaaacggagagtcttctaaatgaagattcgggttcggctctttgtaattgatgctcggcgcgatttcctgatgatataagctcatgataaccttgatgcagcccgccattccggccgctgtatccaaatgcccgagatttgttttgactgaaccgatgccgcagtattgttttttatctgtatatcggccgtacaccgattgaagtgcggacagttcgatcggatcgccgagttttgttcctgtgccgtgagcttcgacgtacgcgatcgtttcgggatgtatgcccgtctgatcaatgaccttctgaatgacctcagcctgtcctttgacgctcggcgcataaaatccgaccttatccgctccgtcgttattgacgccgattccgcgcagcagcgcataaatatggtcgccgtccttaaccgcatcagacgcttttttcaagagcacggcgccggccccttcaccgccgatcattccgtcagcatccgcgtcaaacgctttaatatgcccgtcgctcgaaaaattcagccccggctgatgaacatacccggcgcttgattccgtatgaagggtcgcaccgccgacaagggcgtacttggctttgccggactgcaggctttgaaaagccgaatgcaggccgattaacgaagatgagcagttggcatggacaaaatagctcggccctttcaacccgagtttatgagaaatcatcgtcggaatcgtaccgctttgggcaagcacccatgacacgtagccatccggcgtttccagctgtgctgtcgtctcctccggcagcaggctgcggtacgagtttgtgctggcagacatatacacgcttgtttccggaatttctttggagatataccccgcatcctcgattgccttccatgaatggagcaaaagcattctcagctgagggtccatatactccgcatctttcggtgaaaagccgaagaaaccgggatcaaacatttctttcccctctaaaactgatttagccggaacgaagccgggatgatcagccagttcttcagaaataccgaatcggcggagctcttcttttgaaaagaaggtgatgctttctttgccttctttgatgttattccaaaattcgtaatgatctttcgctcccggaaactcacaggatataccgataaccgcaaggctgtcctcgtaataatcaggaaattctcccgccgggtgttcccggtcttctgcattcactttcttttgcggcacaggagccaaaacggtttctttcggtttttgttctgtgatgtaccggctgatgtcttttaccgtcgcgtattcaaacagttccgttacactgaattcacaatccagttcctgcgtcatccggtcagtgacagtcacggcaagaagcgaatctccccccgcatcaaaaaagcggtcatcaagctctatatctttgcttttcaatacatcctgccaaatcgccagcaccgcctgctggatatgagatgatgaaaatgtttgtgtgtccggctgcttttccgtcagatcgcgggcagcaagaagcttgcggtccacttttccgttcggcgtaagcggcagctcttcaagacggataaacgaagctggcgtcatataggccggcagcgcttgtttcaaatgattgcgcaattcctttgcagacggaagcggctctccgtttttccggatataaaacgcgcaaagcttctcatttccggagtgattgttcacaaccactacactttcctgtacggccggatgggcattcagcctgctctcaatatctccgggttcaatgcggtagccgcggattttgacttgggtgtccatccgtcccatgtattcaatgcggccgccgggaagaaaacgcgccatatcgcctgttttataaagctttgatcccagttcgagccggtggctgacgaaagctttatctgtcagctcaggcttgttgaaataccctcttgccaatccgtctcccgcaatacaaagttctcccggtaccccttctaaaacagggttgagaccggaatccataatatacacgcgggtattggcgatcgggcgtccgatcgtaagcgcgctctcattctccgttatccgctgcaccgcggaccagattgtcgtctctgtcggcccgaacatattccaagcctcacttttcgtatcgagaaactgctgcttcaattgttcgctaagcgcctctccgccgcaaaggattttcacattttcttcatttgaccatccggaatgaaagagcattttccatgtaaacggcgtcgcctgcatgatcgtcggtttgtactcttgaatcagctctttcagcttccgtgcgtcttttgtgacttctgtcttacagatgttgcactccgctcctttgattaaaggaaggtaaagctccagtgccgcgatgtcaaagcaatatgtcgtgacggcaagcagtttgtcttcggacgaaagccccggttcattcgccatcgagattaagaaattggtcagcgcccggtgcggaatcatcacgcctttcggtttgcccgtgctgcccgacgtgtaaatgacatacgccagatcgtcaggtgtcactaaccgcttcagcgacgttctttccgcggctgtactttcaatatgagaccaatcgcggtcaatggcagttgtctgcacgcctccccagttcaaagagtgctctaaatcagctgtcgtcaggcacattgaaatcctgctgtcggcgatcatatattccaatctgtcagcgggataagaaggatcaagcggcacatacgctcccccggcttttaaaatgccgagaagtccgacagccatatgcaatgaacggtctgtataaatgccgatgagatcatcagggcctgcaccgtgcgcctgcaaatagagcgccagcttcgtgcttttttcattaagctcacggtacgtcagcttttgctcttcatacacaaccgcacaagcgtccggcgtttctgccgcctgacgttcgaacaattcatggaagcaggcatccggatattcacggcttgtttcattccaagtcttaagaatcatgtgctcctctctttttgtcatgagagaaacgttctcaagcggcgtatccggattcgccgtcaaagcttcagcagcctgtacaaattggctgaaaagcctggccgcccctgcttcgtcgaatagttcggtgctgtatttaatcgtaagatccatgcctgatgcttcttcccacatttcaaatacaagatcatattccccctcctgatgaatgtcttttacaaactcacaggagaattccttgtattcatcaagcatcgattgatagctcgaatgctgcagaaagttctgatagaaaaaggcattgctgaaaacaggcgaaccgttctgccggggtttcgcatgcacatcacgcaccattttcggaaagggataaaaggagtgatccagtccgtccagaacggcatcctgcaccttttgaacaaagtcagcaaatgtttcttttcgtccggctctgctccgtatgggaagcatgttaaggaaatggccgaccactccgtcaaagcgttcttcgggtctgaccattgcaggcatgcctgtcacaatatcttccttatccgtatatttgcttaaaagcaccatgtaacagctcagcatgacggtagacaaatgaatcgaacgggatgcggcaaacgtcgttatattattcagcagccgttcgggaagacggcgtgtcagcgtatcttctgtaaactccggaacactgctttccgtgcgcatcggcggaagctgaaggtcaggcagatcgccctcgagctgtttcatccagtaagcgcgggcagctttgctttcttcacccgctaaataccgcttttcccaagccgcgaaatcgggatgaataccgggagcggcagctgtaaactcttcttttccctccagcagcgcctgataatgatccagcagactgtgaattaatgtaatggatgaaatgccgtcaaacacgatgtggtgaatgaccgtcaaaagataatgttcctcggcggattttgaaagcagctgcacgcgcagcaaaggcccgccttctttgacaaacggctctttcacttttttccgtatcagagcggatatttgtgattcattgacgtcagaaatatcttcttccgagaatacaaaaggatctgccgcttctatgaaataaaacccgccgtctgtttcattcacggcgcttttgagcatcggatgctgctttaatacgagctgaaacgcctgtttcagtttctctttgtcgattccggatgtgaatcggaaacagagcgggacatggtatgcagtcgtttcaggcgacattttctgcaatgtccacagccctttttggacttctgaaagcgctggcgccgtttgccgtctctcccgttctgccggcggttcggctttttggggatgatggtccgctgacatgtttgccgctttttcagcagtataagccgctaaagcgccaatcgtcgggtttttgtgcagctctcttgccgtcagccggatgtgatacgttttttcaattgatctggcgagtttcatcatcttgatggaattgacgccaagactttgaaacggtgtatttggatcaacgagctcatccgcgatggaaagttcctctttcagaaaacggataaaatcccgttcaatttctttctctgcagaagccgtgtctgaattgccgccttcttgtctgttattatgtaatgaatcaaattgcccttgttcaaatgaatgtttcagctgagtgcgctggattttcccgatcgccgtcttaggaatgtcttcttttgcgaccggaagcagataatcaggggtaacgccgattctctgtgtcacgtgctggtgaatgtgatgaagaagcttcgtcatgcggttctcatccaacggaacagatgtcacaaagaaaatcgccagctcatctgtcgtgctttgattcggccggacggcgcatgccgctgtatatgacgtttcaatttccggcaattcctcaacggctgattcaatggcgtggctgtaataattcacaccgttgataatgatggcatctttcgtgcgccccgttatcgtcaggcggccttcacgcagaaatccgagatctcccgtttcaaaccagccgtcttctgtaaagacactatcatttaagtccgggcgctcataatatccgctcgttacagtcagacccgacacttggaagcggccgatttctccttcttccaccacttgattgcggtcatccgtaattctcatattaaatcccgggatcggcagaccgatctcgacgaaacgatcgtcgtcactcgtgttttccaatgtaaactcatctgagaaaataacgcccgaagacgtttcggacattccccatgcgggacggatggcattagccggcagaccgtgcggctctaaaagctccataattctgcgtccgactttcgcaaccgcggcctccccgccgttcagcatgtaacgcatggaagataagtcccatttccgcgtttgaatctcttctgcaaaatcagcaagcagcccaaaggcaaaatttggggcccacgtgaccgaagcgcggtaatgatcaatcaggtcgagccattttaaagggtccatcaaaatggattcgctcggtatgttgatttcctcacatccgagataaacatcacgcagatgaagcattccgatgccgccgacatggtcaaaaggcatccagttaaacgtgacatcctcacttgtatagccctgcatctgaatatttcctttgaccatgcagacgatgttttcatggctgagcatcacggctttcggcgtgcccgtgcttcccgaggtcaaaagcagcatcgccaaatcttccggacggggatgatgacagtccgtatccatttcgtgcgcactgagatcttctgccgctaaagcgcaaaaaccggaaagctcctgctcctccgcccattcagtcatctccggcagcacgtcacggcttgtgatgacatacggctgattcaaaagcgtccaggcgtctttcagtttttgcgtcccgctgttcatttctgtataagccggagcggccgcaagcggaacagggatcgctcctaaaaaaacacagccccaaaaagcaggaatcaactgggaattgtcactgagctgtaatatgacttcatcctgagccttcactcctgattggcggagccctttcacaatcgaaagagcgatctttttcaggccgctgtaagtctggtacactttggtgccgtcaggctgtatatatgtgatgcccttttggtctcccgctgccgcggcggttttgtgcaggacttcaggaatcgtcatcggctgatccgctgaaagccgcaatgattttccatagctgacagatggcttgagtaacccgcttgccttcatatcacttttcatagagctgcctccatttcatctgtatgtaagatgtatgtcttatactccgtacatcgtcgtgattcgttttttcacttcatcatcatgaaacgtctcatcgtgcatgattaactccttctcaatgacggccggaagctgctcgcgaaacggcgtcaccaagtgccttttcaatgtaattaaagagtttctcggtttttccgcaagctcacgggccaattcctgcgcatagtctagtacttcctgccgaggaagcaccggaaaaggcacccctcttttctccaggtcaccgccgcggtagtggccgccgtttaacagcatttcatggccgaggcttgccccaagcttctccggaacgataaaggtagcgcccattccgggggtgaaaccgtatttcataaagtttgcggtatacacgctttctttgcttaaaatgacaaaatcactgaaaagccccatgacaaacccgcctccgattccgtggccctgcatggcggaaatgacgggaatatcacattccagcgccaaagagtacatgcggtcttccgtaaacttcgtgatgccctgctgaatcctgagcaggccttcctgtgtgcctccggaagcaaagtaatggccgtatcctgttaaaatcacagctttatagactgacgatttttttatacgggtgaatgcttccatcaatccatccgtcagttctttggagaaggcgtttttatgggctttatcctgcattgtcacttggataatatccggttcaatttcgagcagttcaactgcggcgttcggcatgatatcctcctaactgttctccgtttcccaaggaagccgccccgtttctgcataacgggtgatggctgattggttatccggatctgaaaacatcgcttgattttcggctaaagcaatggatttcgaacgatgaacaaggtcgtttaaggaatccatgtattgtttatagcggatgactgcttttttcgacagcgggcggaggcgcagcaaatgctttctcagctctgttgctgagtccgggacgcatacgtcacaaagtccccattcaagcgcctggcgtgccggcacgggctttgtcatgatcgtcatataatgcgccttttgaaatccgattctttgaattaaaaacggcagaacgcaggccggataaagtccgaataacagttcagataaactgaacgaagcattctcctctgcaatgacgatatcgcacgcggcggcaaaaccgacacctcccgcatttacttttccgcggacgcgggcgattgtgatgtacggcccggattttaatgccagccacaaacggtaaagcggctcctgcgattccgcatgctgcattccctgcctcattttccggtacatctcatcaaaatccgccccgaaacaaaatacctccggctgcccttcaagcactacggaggtcacggagtcttcacattcagaaagaacatgcaggcattcctccactaaacgctcattaatcgtattgttggcttcaggccgatcaaaggtgatgaagcagacattttgctgaaaacggacgtttatcgtttcataggtcacgatatccacctgtatttccgatgaaattccgtgatttcttccaaatataaacgagggctcccggcatgatggtctaaaatgttcggaatcatattcatatccaatttgacattccgggtaccgaacttcaccaaaccgctgcctttaaacagttcttcatactcttccatggacagcctgtatctgttgttcagatgctcttctattttgaaagaatgctgccgcgcttgcccttcaggcgtcacaacgccgctgtaaaattctgaacagcatccggagccgtaggagaaacagccgatccgcttagaagtgtcaaatgccccttggtcaatcgtgcttgcaagagccagtaaagaggctgctcccataatgtttccgactctttggcagtagcggagccccggctctactctggtttgaaaatcctgttcgatttcagcgtttttcgcttttgcaagcttgcgcatcatcgtccggtgggcccctttgaccatgccgccaaacggtgtatggaaggctagatagtgaaacgtctctttgtagtcagcgcccggcacacggtttttgtactcgcgaaatgtctgttcacagcaatcgaggtaagacatcaatgacaaatcggcgtcaccggcttcactgtccgggatcggacggcatgtatccatcacctcatagccgtagtagccgttagcgcccgcatccgcctgaaatacaattggattttcaccgatcaataaggcgacggcacccgctccggcgctgggttcggcgtaagaccaatcctcacttaacgcatcaccgccttcggcaattaaaaaccgggaaatatccgtcgcgacgacaagcgccttcgctccgggggatgtctgcgacaaaataaagttaagcgccatctgcaaacccgccgttcctgaataacaggcttgtttcagttcaaataaacggcagttccggttgaggcctaagtaatcatgaatatatgtactgagtgattttccgaagtcgatgccggactccgagcaggtaatcagcagctcgattctgtctttttcagcctctgtcaatcggtcgataatcggctttgccgcgttaacgccgaatgtaacggggtcttcgtacggaagcgccaccgctttttctttcatcagtaaattttcaaatctggcagggtctaagtttctgtactccgccagctgcatgacatcaaggtatgctgtcccgccaaacacatttatcgcttctattccggcagccgccatgaacttcgcctccaatatgaattttgagtttccgattatttcaccgttttatcagacagcctgtaccttttcataaagctttgccgccaattcgccgatgtttgacactcccgtcagctcaacacgcgggatctgcagtgataattcttcaagcatcatcgtgataatttcggcgcggtccactgaatccgcccccagatcaactaaccggtcttcctgtgaaagctgttcgccttctaaatcaggcaaaacctcgtagattgtgttctgcagcaattcaaagattttttctttactcattgtcagttcctccctgtttcattttttatgaatattccatgttttcaatctatcatttcgtcttgtcaacacgtttgcaaaaatgaacctaacttctgattcaaaagcgtggccgtctcttccataagccgcaggccgataccatcggcatggcggtttttccaggactccagctccgtacctttcacccattgattaaaggcgcctaatgccgggccgcaatgaatctggaagtctaccttggcatccgggtcacctttaatcgccgaagcagaactttgcctgaaataccatttgaatatgagcgccattttctgtttcggattccgttcggcttttgaaatgtcttcattcgaataatgagccttcactttgtcataaatactgcttacacttgccttaaaatacttctcttctatttgtctgagtgtcttttcatcaatttcttcaattgagcggtgacgctgatacagttcatgcagcttagaggcgcgggtcggaaagaacagccctttctttaatacctgcaccttgctgcctgattcaaacatatcgccggccggcgcgtaggccgtgtcctgtacattcatctgctgcaggaggtcctttacgaggctgctcgtcgctgcctcaacggtgcattggttaatagatccggtcacaataaaatcagcgccgagcataaatgcggccatggcagcctcgggcgttccgattccccctgcggctccgatgcggacggttttgccgtatcggtattttttcatcatgtcatctcgtaaacggatgatcgccggcatgagactgtaagcaactccgccgtcagtgtggccgcctgaatcagcctctacgcagatgtcatgcgcaacgggtatttctctcatcagacttgcttcttcagcggtaattttgttttcggctgcaagtttctgcagaatgtgatcaggcgccgggctgagaaacgcttccgctacttccggacgggacagcttggcgataatccgctgacgcgctattatttgtccgccggcaccgcgttttaaccccttagcgcgaaaccttactaaagcgggagtaaccgttaaaaacgctgatgcttccaagttctgaatcccatgcttcagtaaaagatcaatcattttttcttctgaatctgtatgcttcatgttatgtacaacatttatgccgaaggaaccgccgtcacgaagctcatgctgaattgacaaaatgacgtcctcaacgtgcgcgatgttcaaaccgcccgttccgaaaaagcccatcattcctttttcggccagtttgacgaccatttccttcgaagaaattccccggtacatgccgccggccaagtaggcgtatttcaattgataatcgcgcttaaactcttcatttcctaaagacgccgccgtaattgagctttttccagcctcagccgggactttgatttcatctgttatcggctccgcttcagccgtaattctttgtatcagccccgtcagcacttttccgggaccgatttcctcaaagctcatgttctttcttcccattaagaaacggatgctgtctgtccagttcaccgatcccgttatttgtccggtgagtgtctctttcagctctctctgctcatagggtcttgccgtcacatttgaaatgaccgggatggacagcggcttaaaatggaaagattcaataaaccgtgaaaactcttccttcgcttccagcatgtatctggaatgaaaggcgccgctgacatttaagcggtgaaccattttcacgccgtttacggcttcaaaaacggatgctgctttttcaatatcttctttatatccggaaatgacaatttgctgcggtgtgttcatgttggcgatatcaatcatatccaagtgattttctcttaaaacatccgtcacctgctcatgagtcaggccgatcaccgctgccatgccgcctccttttgcgcggctcatcagttcgcccctttttttgaccagctgtaagccttcttcaaaaccaaaggcgcccgaagcgtataacgcgttatattcgcccaaactgtgtccggcggtaaaatccggtttcaagccggttccttctgtttttttcaaataactgagggcattgacgacatagagcgccggctgagtgaattgagtctgattgagacgttctccgtcccggcacagctcctgaatggaatatccgagaatgtgatcggcctttgcggttaattcaggatagcggccgaacaggtcttcccccatccctattctttgcgagccttggcctggaaaaacaaagctgatcatcttacagtctccttccgggcggtgataaaatgctgtcttctatttgctgcaaatgtgtttgttctttatgaaacggcgtcataatggcacggatgcgttcagccgatcctgcgggaagaatctgtttggcaaatgcggccaatgttccggaaggcccggcatcgatatacaatcctttttggcggctgtctgcgaattgaagcgcttcgcggaatcgaatcggctttcttacgatatcccagaaaaagtccgcttgtatatcggtctcagcctctccggtcgcactggagatgtacggtataaacggagtccggattgatttctgagctaaaaagcgcttgtacggctgttccgcctgatcaaccagcgctgagtgaaacccgtaagataccggcaatagctgatgaggaatctgcttttctctcagatcgtccatgatctttttgatatgttcccgctctcccgagatgacaaagtgagaatgatagtttacagatgccaattcactatgttcgccgagcagcggatcatcttgatataaagccggatcacccagtatcgcaagcatgctgccgttacggcaagtttccgtaacgattcgggcctgttccagcacgcaatctaaagcatcctcggcgctcagcacgcccgacacagcggccgctgcatactctccgaggcttgctccgatcacataatcgggacgtatgcctctttgctccaaagcatatgcaagtgcgtactcagccataaaaatggcaggatggctgaaaagaaggcggtcaaatggatcagacagacgattgcctgtatgatacatctctttaaggacagagtaaccgaaacggctgactgcaaaatcgtccaagtcaagcattttctgccgaaaagcggcgttatgtgcaaacagctctttccccatttgatagtattgggaaccctgtccagaaaacatgaaaacaattggctggttcattagttctcctttttgctctttattttttcaaaatattgatttatgagtttttcgtgatgtcgtgtgcaggtgaagtggtcgtgatgctgtatggctggcactattgtgtgagataagaattttgacttgcgttccgctacatggcgggtgaagcttcagtttcttttttgatgcggtgaataagtcctgtcagcacatggcccgggccgacttcttcaaattccatccgccctttgtccagcagatagcggatgctgtcgttccatcgcactgaatggtcgatctgatcggccagaacggagtggattccgtcttgctcataaggtctggcatgcacattagaaatgacaggaattgatatagcagaaaaatgaaatgactgtaaaaatttttcgaactcttgttttgcttcactcatatacctcgagtgaaaagcgccgcttacgtttaacggatgaaacatcgtaacgtcttttaatccttcgaatacgcttttggctctttcaatgtcttctttgcgtccggatatgacaacttggtgaggagaattcatattggcaatatcaatcgtatgtaatccgtgcgtttgaagggcgtctgacacttgagctgcagttaaccccataacagcggccatttttccgtcagtggccatactcattaattcgcctcttttacggacaagctgcaggccggtaataaaatcaaacgcacctgctgcaaacagcgcattatattctcccaaactgtggccggccacataatccggctttatgtcattgtcttggatttttttcaaatagcttaacgcgtttacaacatataaagcaggctgggtgaactgcgtcttgtgaaggttggaatacggattctcaagacaaagccgtttcatggaatatccgagtgtttcatcagcctgctccgttaagtctttaaattcatcaaacaatgagctccccattccctgcttttgagaaccttgtccggggaataagtatgtgatcattttctcagccatcctttctcggattcagataagaagcatgttcaagttgatagtaacttcacaaaaataccatgtcaagttaatttatcctatgcgaactcctgaataatgcctatttttccctgtcgaaaggcgggctcagggctttcggaacaggcgtaagcagaatgtcccatccggcctgcccggcgttctcttccgcaaactcccgttactcagccattcatcaccagaaatctagtaataactaccattccatttcagaacttctttgcctcaaaagaaaagctagttagaaagaactaaatcacacattacttaaaatgaaacagccctttttgattttttctgttgcggaaattcacaaaatgttcttttttttcaatctgaaagtaaatattgtttttcaaaagactctccattttttgacccggcttctccccgaaggagtgccccggatacacacgcacatgcggcggaatggaggctttgatcctctgtatactgtgaaacatatcttcagctgagctgcccctgtcctcacatataccgcacccttctgtaaacacggtgtcaccggtaaaaagatgatcagatagcaaatagcacattcccccggccgtatgtcccggggtcagtatacttctgatgataaaccctccggccgcaaaggtttggccgtcttcaagcgctattaagtttctgcaccggaattgatagaaatcgatttccgccgacgacatgtatatatcagaatgatagatttgctgaagcggctccgccaagtttacatggtcataatgcgaatgtgttaataaaatagctgataaatcaacatccaattcatgcagtttatcggttattttatcgatttcccaggacgggtccaccgctatcgcagatttttttgagcggtctgcgataatataacaatagttggaccacatctggtgataagttttgatttgatgcacttcatatgtatgatccattgtcaccattcccatttaaaagatccgggcagactgctgccgccgcccagccgactgtaaccactttaccagatgacaccacgtttttccatggattttccggtaaagataaaaaaactttctgctcccgccaaaagcaccagtctggactttttttacaaattgctatgctgatatataaggaaatcaggatgttcatttagatgaattctttagggaattttattcagaaaatcaagaatggatatgagtttcggataaaaagaaaacaaattgagcttttgttttgaaaagcaattgccgaagcggccgaaggggatgatcagtttttagaaatgacccgcaatcaagattattatctcaatccttttcttcaagataataccgaattgcaacgttatgttgacattaacataattagatttagaaaagtacagcgtaatttacactcttttcttttgtgaaaacaccattttaaaaatcagtcctagctgcaacaattcacgaaagcgccgcgcatgaaaaaagacgccagttgaagacgattaatatttgatctgctgcccaatgatttaagcatattttgatcaaattgaacaaacaggcgcaacatcaactgataaaacaattgccccaataattgatcataaaatatccagattaccaaaaggaggttttataaaaattaaaattcttagggacttcccttaaggcagggatcaacatacttttagaacagctagtctagttgctatattttcgcctaaacttttacttaatgattttatattaattttgatttacacagtaaaaagataaacctcatttatcttcttcaattgtccaataaatctttaatcagaattaacaaaaacatctgatctccttgtcaaataatcgaatattatacgtttataagaatgagatagatccatacttttatatataattctattatttacacttataatattttccatttaggtacgatatacctatttacctaaaaaatccatattgctagaatagcaactaaggaaggaggagtaattaactgtgttcaatccaaaaacagagaataaaccgaaaatcaacattttaagctctgtttaatattggaggctcatactatttttacttacagggtctttagtcttttctctctatatgttgtcaaacaatcgggctacagattctaaataaacagctatgaattatgcatcacttttcaggagataaaacaaattttcttacaaattaaagtgtttctcaatctataaaagttgtaattaggtatgtattaaatcataaaacaaagtttttggcaggaaacagaattagaattgaacttgaagccaggtttactaagattgaacctgcctttagagatttgattggttatccggtaaattatcaaatccaaacattatcgataaaacattactcattttacaatattggttatcttgggtttccagagaagatcaaaaaacaataatatagattaaacggaggattaacaatgaaaaagtctgtaactaaaggtcttattatgtccactgtcgcaagtgtatctattttttcattagttccactagcaggagctgtttcagcagaaaaagaagtccaaactaatcaaacaatacaaagccaataccaaaacgaagcagtcttacataaaactgcacaattaccgaaagataacgttagtcttgacgaaatagctaaacactttgaattaaccaaaagtgaaacaaatcaacttaaagaagctgttaaaactgttaaagaaaaacaagggtcggagtttactgctcaaggtaaattgtcctgggctgtaaaagcactcagagcagcttgggatgcaatacctactaaggttaaagctgctatgggcggaatcggcggttttgaaataattcttaataccatcgacaattttactggtgcggttgaagatgcgtgctatgcgggtgctttaaaagtaactgggaacccaacagccgcttggtggattactaaaactcttatgcttttcctttaaacgggactattgttggtgtttaacaaatttatcctgtgttaagctttaaagtgattatttctaaagtgttaagacaggaggtaactatggaagataaaagtaacgctgaaccgagcccaaaagctataaaaattctaacttacattattcctatagttttaatagggcttatccttgttcttaagaatattaataccgcagcagcagaaatttcattttatatcgttgctatcggtgtggttctcttagtggttttcagtttgatcaaaaatagaaaaaaccgcaggaagaactaaatgtaaggggggctaattactagtcccccttgactaacttgcggatagtataacctgccaaattcgaattttatttaaattccccctccatctcctccctgtgaatttggaaaagcaggtacccatctatataactcagggtagtcatctggttcttcacagataactttaagattttaaggaatcgttttctccattatttcactattaatgcagtgacatatagacggttacaccaaacacaagatgctgcgctgtcaccccaaatactatccataaacaatttttatatgaaagaaaagcagctggatgttaaacaaattattttcatgatttacggcatacagatgcaacaattatgccagaaattaaaaaactcaaaagttatctctgaaaggctgggtcattcaaactagtaaggctgcttgtgggcaaataacggtttagtctcacataaacgttgtgattacatcacacgcttaaacatcttctccatctcatacgtactgttatttttagttttttgacaataaaccatgattactcaaaacattgatatttcagagcttctaatagttttctgggtaaatatttttattaaattagcatggttagacataaagagagcagcctccttttttgatgataataaatatgatgatgagtggatcgagaatggttacaaaattaaatttaagcgaacccctattataaatatagcggatgtttatatatctaagaaatagtcttaactttttaatttaagggaatgaaagatatgctgactcagaaaggaaatataccgtattatacttaacatgagctaccgatgtaaaaggccagttaaagagaaaaacaggaaaaagcgaaatagatttacgtgcagttgtaaaaagtctcatgcgacaaggagaggttccgtaagacaaaatacaaaattgcatcatctaaaaaagcccaaactctaaaaagttgggcttttaatttaagcggggagaaagcgatttgtagccttaaaataaagtttgattaaatgaacttaataaaccttgataaaagtacaaatagaaaaaacgtgttttgaaaaaaagattgatcaaaacacgttttttctatattcatttcaatcatcgttttataaaaaagtttgatcattttatgtctagaatcttcaacaaacgcgcagtctgaggaatagtaccttataataaaaactgctgagtgctacctagactgaatactccacccatgtgttttaagcttttttatataatcttcaacactaattttttcaacttcaattgctaacggcgtcagtgaaacaaggcactcatttgaagtataatttattgtaacttttaccacctcgtatccattatggaaacctgaatcaaatccaggatcgtcaattatatctcctacttgagggcgaaagtcagattcaaatgttttcactaatgtttgagtattttcctctgtaggttcttgattaattgatgagacaaataatattaaatttatattcaaagcatttccccccctttctatgctgtttaaataatctttagtttaattctattgttattgatgataacaaattttaacttgcatcacaaattaattgtgccattaaatggaccgtttgttgaattctaaaaatctgtattgttaatgtgattctatcaaacttttttataaattatcggactttgttttacataatcaatctttattttaaagctacacgattaagttttttagtcctcccctctttttcttttatttgattttactactatccccgtaatttgcacaaatggaaaaaccgcaatatgattgcggtctgctgtgatctgtatttgaagttattcagtccgctcatcagcttgcggctttagtaagatggttaagacaattcctgataatatcaaaacatttctataaaaaaagattcggattatagaatgcttaaagacaattacctggacaaggaacaagtatctgtctttatggaggcagcaaaatcttctaaatatcatcattacatgatcgctttaactcttttaaggaccggcttaagaaaaggtgaactcattgctttatattggtccgatattgactttaataacaaaactttaaggattgctaaatctaagaacgagtttggaatcacagcacctaaaacccgtaaaagtgttagaactataagcatcgatgacactttaattaaagagatgaaaaagtttaaggaatggcaagaagaaaataaaataaaacacggtgataattataaccagtctcccttttttattaccaaccataagggagatgaccttggaccgtttggaattgataaagtcatagattccttgctaaagaaaactgatctgcaccacattactccacatggtttgagacacacacgccattatgctgctagaaagtggtgcagatatcaaatttgcaagtgagagactcggtcatacggatgtgaaaatgaccgctgatgtctatatccatatcttgcagaatcacaatcaaaaaagcattaatcagtttgatgaatacctaaacagctaaaatcagtgggcaaaatgtgggcacgagagagaaatccctcacagaatccttctacatcacacgcttaaacatcttctccatctcatacgtactgtggtggataatgatcggccggccgtgcgggcatgtgaacgggtctgtcgttcggcgcaggtcgtccaagagcgctttgatttcgtcgtttcgcaaatggcggttcgctttgattgagcctttgcagctcatcataatggccgcttcctcccgcagtttcttaatatcgatctgtttggcgtcaagcacctgctgaatgatttcttcaatcagttcagcttcttccccttttggaaaccaggccggatggcagcggacgatgtagctgttcgtgccgaatgcttctaaaaatactccgacgctttcaagctcatgctgatgctggtcaatgatcagcgcttcatttgctgcgtaatgaaaggtgagcggcacgatcatatcctgcacttcaggctcgacctgcccgactttctcccggaaatattcgtatttaatccgttcttgggccgcatgctggtcaatgatatacaagccgttttcgttttgggctaaaatatatgtcccgtgcatttggccgatcggatacatcaccggaactctttcctcccgtatttcttcagagacagcttccggttccggagtatcggaaacaggcgcttccgtttcgggcatgccgatctccggcggcacatcgtgatccgcttcattcgggaggatctcttcttctattattaccggctcaggctcttttacgaccgaactcagcttcattggtgagtaagacggctccggcgttttttcaggaagtttccgctcaggcgcgctttcctcgaatgtcataaattgctgttcgtttttggccggtgccggcgcggattttttcgggagctgggcgctcggaataagccgctgcttttgaaacacttcctttatcccgtcacggatcagctcatgcagctccgtctctttgctgaggcggacttcaagcttcgacggatggacattgacatcgaccaaaatcgggtccatcgtaatttcgataaacgtaatcggatggcggccgatcggcagtagtgtgtgatagccctcatgcaccgcttttacaagcgggaaattcttaatgtatcttccgttaatgacagatgacatgtagtttctggatgcacgcgtgatttccggaagcgcaatgtagcccttgacttcaaaatcaagcgagctgacatggagcggtatcatttttttcgcaaccgccgtcccgtaaattgcggccagcacatggcgcacatccccgttaccgtttgtctgcagcagacttttcccctgatggcggagacggatcgatacttccggatgcgcaagagcgatccggttgacaacatccgtaatattgccgagctccgtatgcacggttttcatatatttcaatctggcgggtgtattgaaaaacaggttggtaacgataatttccgttccttttctgctggaggatttctgctcagaaatgatattcccgccctgaagaatgagatgggttcccgctccctcgccgatgctcgttttgatttccagatgagaaacagatgcgatacttggcaaagcttctccgcggaaaccgagtgttctcacccggaacaggtcgttttcatctttgattttactggtcgcgtggcggcggaaagcccgcttgcaatcatcggtttccatcccttcgccgttatcgagcacccgaatcgacgaaagccccgcttcctctatgtcgatttcaatgactgtgctgtttgcgtcgatggcgttttccaccaattctttaacgactgaggcaggccgttcgaccacctcgccggccgctattttatttgagagttcatctgagagctggatgacttttgccaagtccgtcacctctttctattttaattttttttgcagcttgtacatttcattcatcgcctcaagcggcgtcatatcgagaatattaattgacttaaaagcttcaagcacttgtttttctttattagaaacagccggtgccttctgttctttttcaccgtcagtaaaaaaggacagctgtgccggttcttctctgacggcggactttttctcagataccgccggaagctccggtttatcccccgactgctcaagctgtttcaaaatctcctgcgcgcggctgatcagatcgtccgggagctcggcaagctgggcgacatgaatgccgtaacttttatctgcggctccttctttgatttgatggagaaacacgaccgttccgttatattcctctgcgcgcacatgaacgtttttcagctgaggaagcttatcttcaagcaccgtcagctcatgataatgcgtgctgaacagtgttttagcgccgatatgatcatggacatactcaataatcgcctgtgccagcgccattccgtcgtacgttgatgtcccgcggccgatttcatcaaacaggatcaggctgtcttttgtggcgttcacaatcgcgtttttcgcttccagcatttccaccataaaggtgctttgtccggaaatcaaatcatccgctgccccgattctcgtgaagatttgatcaaaaatcggcagaaccgcttcttttgcgggcacaaaacagccgatctgagccatgatcgatagaagtgcgatctgtctcatatacgtgcttttacctgacatattcggacccgtaatcaggagcatttcccgcgaatcgcccatcaggcagttgttcggcacgtattcttgactgtccatcaccttttcaacgacggggtgtctcccttcaatgacttttacttcattatcagaaaagacgggctttgtgtaatgcctgttttcactgatcgtagcaaagcattgcagtgcgtccagctcactcatttgtttggcaagacgctgcaagcgcggaataaattgtttcaccttttcacgcagtccggcaaaaagctcatattccagctcgcagatgttgttttccgcttctaaaataagcgcttctttttccttcaattccggcgtaatgtaccgttcggcgtttgtgagggtctgcttccgctcataccgtccgtcttcaagcagatgaaggtttgcttttgtgacttcaatataatagccgaacactttattgaaaccgacctttaatgaacggatgcccgtataagcgcgttcctgctgctccagtctggcaatccagtctttaccgtttttgctggcgtcacggtactcatcgagcttctgatgatagccgtctttaattaaattgccttcttttaacgataacggcgggttttcatgaagggcatcttctaacaggtcaagcaaatctccgcacggatcaatcaagccggcgcgttcttttgcttttttatggttaagagaccctacaagctctttgatgctcggcacttgttttaaagattctttcagctgaattaaatcccttgcgttgacgtttccgaatgcgacccggcccgccagacgttctaaatcgtatacttccttcaggcgctctcgcagatcttcacgctcaaacagatgattgatcagcgtctcgaccatttcctggcgttcttcgatttgggatgccctgatcagcgggcggtcaatccattgtttgagaagccggccgcccatcgctgttttcgtctcgtctaaaagccaaagcaatgacccttttttgcttttcgaacggatcgtttccgtcagctcaagattccgttttgaatacaggtcaattttcatcgcttcttccaattcatatacttgaaccggctgcaggtgatccaggctccgtttttgcgttttttgcaaatacgtatataaacgcataaacgtctctgtcagctcttcgcccggcaagtgctttgcgatttcaatgcgttctgttatttccccgtcttcgatggaaatcgtggcgccgcaccgttctttcagctgagcagctgtatgttcgttaaacttgctcgatacgacaatttcctttgcgccgactgagtaaatttctgacatgacatcttcaatccgctcaataaatacggccaggttttctccggtcgttaagtccgataaagcgagaccgtatccgtcacgaaattcggaaacggaagcgataaagttgttttccgactcgtggatgccttttccatccatcacggttcccggtgtgatcagctggacgacttctctttttacaacgcctttagccgccttcggatcttccgtctgttcacagatcgccactttatagccctttttaatcagctgttcaatataagccgccgcggaatgataaggcacgccgcacatcggaattttatcagccgaacctccgtctctgcttgtcagtgtaatttcaagctcttgtgacgctttttttgcatcttcaaaaaacatttcataaaagtcaccaagccgaaaaaataaaaaggcatcttggtgctctgcctttaccttcaagtattgctgtatcataggcgtgtaactagccatcatttaatccctcactatgtatcttctcttatccgaatcccattataacataaacaaaagagtgatatctttatatataaaaaagagacttggggtgttaaactcccctagcctcaacttattcttcaggatctccgactaaaaattcagggttaatgtcctctaattcttcatcaagatcgtcttcccaatcatcatcatcgtcttcttcccagtcaggattgacttcgacgacgactttcgtttcaccgaccacttctgctaaaaattctctctctgcctgaaccacgattttatttccgttaggagaaatggtgacttcaagacaattcggctgctgcagcactttggcaatgacttcgtgttcgtcatctaagtaatttgtgtctctgtatctgagtttaatcacatcgacatactttactctctcggttacaacttccgtttttgtattatcggcgtaagagtaccagacgtttatatcataatacccttcaatttctacagtcttcccgatcttttcggcatcgtacttgtggttgataatccagccgcccaatatacttgacggtttttctccaggtgagatcgtgttggtgcattgggtgaattttcttcctttcgcaactaccgctttcgtaataatttccctgtattcagacattccggcaggcctccttgttcttcttcgtgttatcttatgctgggcatttgtctcatgtgcatttttataataaaaatataaaaatacaaagtttctgtttcattgtatgcagccctgcccagaaactttacttttaagtatgataaaactttccagtaaaatgggacaaaacggtgagtcaatgaaaatttagtacatattacaattagttctcaaataacaaaaaaaaacacgggccgatgaaggccccgtgtttaaatagaacagctattattcgaatgttttacttttgaaccggtttctcccgtcagcaggttgcctccggtagatgtaatgatttcgtttgtcacctgatttgagatcgtatgtgcgacaagctgaagaaggtcattgacctcaatctgggaatctctgaattcctgaatgatcggaatcccttcaagctcttcctgcagggcgtcaattttactttccacttgtttcagcgcttcaagcttttcgtagtgcttcaggttaacggcttgcttttgcagagttttaatctgattaataatcgcagagactttttcattttcgttaatctgcgcctcggcgcgtttgaaaaaatcaacttcttctgtttcagaaatcattttcgcaaggttcctagcctgctgtacaatgtctttcttagagtaaagcgtcattattatttcacctcgattgcttctcctgccatcacaccgtcaagcgaccatgttttcgcctgttcgattttgacgcgtacaatcttgccgatggcgtctttcggccctttgaagttgacgagcttgcttttttccgtatagccggcaagaatgtcagggttatttttgctttctccctcaactaatacttcgacagtcctgccttcatattccttcatttttttggctgaaatttctttcaccaaatcattgaggcgctgaagacgttctttcttgaccctcatcggaacattgtctttcatcttcgctgccggcgtgccttcacgaggagagtaaataaacgtatatgcgctgtcaaattccacttcgcgatataacgaaagcgtttcttcaaattgttcatcggtttcattcggaaaaccgacaataatatcggtcgtcagtgaagcgtttggcatcgccgctttaatttttccgacaagctccagatagcgttctctgtcatatttgcgcgccatcatttttaacatcgctgagcttcctgattgaaccggaagatggatatggtcaagaaggttgccgcctttggcgagcacttcgatcagatgatcatcaaagtcacgcggatgactcgtcgtgaatcggattctcggaatatcaattttacgcagttcgtccattaaatcaccgagaccgtacgtcatatcctcaaaatcttttccgtacgcattcacgttttgaccgagcagcgtgatttctttatagccttcgcttgcaagtcttctgacttcctggataatttcctcaggacggcggcttcgttcttttccgcgggtatacggtacgatgcagtatgtgcagaacttgtcacagccgtacataatgttgacccagcctttaatttttccgttgcggactttcggaaggttttcaatgacatccccttccttcgaccacacttcaatgaccatctcttttgataaatatgcctctgataacagttccggcagacggtgaatgttgtgcgtgccgaaaatcatatcgacaaacgggtgcttcttaaggatgcggtttacgactgattcttcctgtgacatgcagccgcagacgccgagaatcaagtccgggttattttttttgagcgcctttaaatggccgagctctccgaacactttgttttcagcattttcccggatagcgcaagtgtttaataaaataacgttcgcgtcatcaaccgaatttgtcgcttcataaccgagcgccataaaaatacccgccatgacttccgtatcatgctcgttcatttggcatccgtacgtgcggatataaaatttcctgccttcaccgaggcctttaaattcttctgagattttaaaatcgttatgatattgaacggattctttgccccgttttttcgcatcttttaaagaaggcggaatatatacggcttcaaaatacttgctgtaatccttttcggatgttttgtccgccggattcacttgtccgctttcctgcttttgcttttcattcatgttcgaatgtctcctttcaaccgaaacttccaccctcaagtatactggttaaaagcgtttgacacaaccgccagcctattattgtacaccttattgagaataagaatcaataagaaataaaaaagagggaatcatttcccccttacacaagctgcagctcttttgcggctgaacggattacttccagggcccggtcaagctcctcttttgtatgctccgccgtaataatggtgcggattctcgcttttccttgggcgaccgtcggatacacgatgctttgtgcaaagacgccgcgggtcaataaaaggtctgataatgcctgggctttttcttcctcccctattaatatcggcacgatcggtgtttcgctttttgtgagggtcagccccatttgaaccagtttgtctttgaaatacgccgtgttctcccatagcttttccatatgctcaggctcttccagcaggacgtcaatggcttctatgcatgcggccgttaccgcaggcggatgagaagtgctgaataagaaaggacgccctttatggcgcaggtaatcgatcagaacctgcgaccctgcggcgtaaccgccaagcactccgatggctttgcttaatgtgcccacctgtatgtggactcttccgtcaagcccgaagtgattaaccgttcccctaccgttttttccgagtacgccggaagcatgcgcgtcgtcgaccatcacaaaggcatcatacgcctctgcaagtttgacgatgtcaggcaaaggagcgatgttgccgtccattgagaatacgccgtcggtgacgatcaggcgcatgcggtaattcattgattttttcagcaccctttccaaatcgtccatatcaacatggcggtacacctttttatctgctttcgtcagcctgatcccgtcaataatggaagcatggttcagttcgtcagagatcacgatatcttcttttgtaagaatgcttgataaaacgccctgattcgttgtgaaccccgattgaaaaacaagtgccgcttctgtttttttaaagtttgccaattttttctccagctcattgtgcatggtgaatgttccggcgattgtccggacggaccccgtacccgctccgaattcttccgcggcgcgtttggccgcttcgacaagccttggatgcgacgtcaaaccgagataattgttcgatgaaagctgtatcacgttttcccctttgacttccaccgacggaccctgcttcgtttcaatttgtttcatttgctgccatgttttattttctttcattttatcaagctcggcttttagaaattcaaattctttcattatagaaccctccccttatggaatcaaaatgactttgccgcactggccctttctcatcaggtcaaaccctttttcaaagtcttcaagcggaaactgatgcgtgatcaccggcgtcagatcaacaaggccgaattcaagcatgtgcgatacctgccgccatgtttcaaacatttttctgcctgtgatgccttggacggtaagtcctttaaacaccacgtcatttgtcaggtcaaccgtcaccggacgttccggcagactcagcatatggaaccttcccccgttggccgccatctttaatccttgtgcgatagctgccgggtggcctgacatttcgcagacaaggtcgatcccttctccgcctgttaaggtgtcgatcacctcaagcggatcttccttatcagctgaaatggtgatcgcagctcccaatttcttcgcaagagccagcctgtaatcatttttatcaatcgccgcaatacgggatgcaccggccgctttagccaccgccaccgccatcagcccgatcggtccgcagccgataattgcagcggaaccgcccgcaagctggctgctttccagcaccgtatgcaccgcgttgccaagcggctcttgaacagaagcgacggcggggtccatatcagcgggattttcccaaacatttcgagccggcactttgacatattcagcgaaggaaccggctgtatctacgccgaggatctttgtatgggtgcacacatgatgttttcctgttaaacaagggacacaagtaccgcagacgaagtgggtttcagccgaaacgtagtcacctattttgacatttgtgacgtgcttgcccgtttccgctatgataccgctgaattcatgtccgaatacttgaggtgttttgattcgtttctgcgcccattgatcccaattataaatatgcacatctgtaccgcatatagatgcggcctgtactttaatgagaacttcattctcattaatggaaggtatgggaatttctttcagagttgctccgaaagcgttttcatttttgacgatagctttcatctttcctcccaacatgtacactcctcctcgaaaaaacactgtaataactggattgtaacatgagataaaaaggaggtaaacaccagtgtccactccgagaaaacaactgcttccgtccgaaaaaatgggcgggattttttttgattattatatgaataaagccatttatcatctcttcgtactatcaatataatattgtgagaaaatatgacaacaataaaaacaacccgctcgccttacgcaagcaggttgagaatgtcatgtttttgtttttaacggggttcgacgattaacttaatcgccgttctttcttctccgtcaatctgtatatctgtaaaagccggaatacaaatcaaatctacgccgcttggcgcgacaaagcctctggcaatcgcaaccgctttaacagcctggtttaaggcgcccgccccaattgcttgaatttcggcggctccgcgttccctcaatacaccggcaagcgcgcctgctactgaatttggacttgattttgctgaaacttttaagatttccatttctgctcccccttagttttacaatggataagtgagtgttcattagaacaatcattattagatgttgctatccaaaaagccatccccacaatgcttttcaaaaatagcgggctaccttccatttctactatattcactaagaagttgctatattcctgcttttccttttaatatttttataaaataaacacatgatcacctattcaaagaacatatggtcatcattgattaatatccgttcgatatttacggcctttttcgtttgatcgtcgatgtcaatgagcactccgctcagcgtagttttaccttccgccaccgtaaaccggacgggaagattggttttaaaccgcttgatgaccgtttctctgtccataccgagaattccgtcgtacggacccgtcatgcctacatcagtaatatatgccgttcctttcggcaaaatgcggttatctgccgtttgcacgtgtgtatgggtgcctaccacggcagaggctcttccgtctgtgtaccagccgatcgcaattttttcgcttgtcgcttcggcgtgaaaatcaataaaaatgtacggcgtgcgctttttcgcttcttctattaattcatccgctttagcaaacggatcatcaagcggcggaagaaacgtccgcccctgtaaattaatgacggcaagctcttttccgttcgatttaatataagtaatgcctttgcccggcgtaccttccgggaaattcgccggccggacaagatgcggcacatcatcaataaagtcgaagatctctcttttatcccacgtatggtttcccattgtaatggcatctgctcccgcttccatcaggctgtggtagatcttttctgtcagtccttttccatgtgctgcattttctccgttaataattgtaaaatgcggtttatgtttcgctttcagtttcgggacatattcttttaccatgtcgcggcccggggaaccgacaacatctccaataaataaaattctcatacattccattccttccttttcagggactcaaaaaaataaagtgatgcgctaagcatcactttattttgcatactctacggctcgagtttctctgattacggtcactttaatgtggcccggataatcaagctcgtcctcaattcgtttacggatatcacgtgccaaacgatgggcttctaaatcattaatggagtccggcttcaccatgatgcgaacttcacggccggcctgaatcgcaaatgatttttcaacaccttcgtaagactcggagatttcttcaagcttttcaagtctgcggatatagttttcgagcgtttcacttctcgcgcccggtcttgcggctgacagtgcatcagcggcagcgaccagaacggcgataatggaagtcggctcttcgtctccgtggtgtgacgcaatactgttaatgacgactggatgctctttatatttggtcgcaagctccactccgatttccacgtggcttccttccacttcatggtcaattgcttttccgatgtcatgcagaagaccggcccgcttggcaagctttgcatcttctccaagctcggaagccattaaacctgctaaaaacgcaacttccattgaatgtttcagtacgttctgcccgtagcttgtacggaatttcaaccggccgaggatcttgatcagatccgggtggagtccgtgaacgccgacttcaaacgtcgtctgctcacccatttcccggatatagtcatctacctcacggcgggatttttcaaccatttcttcaatgcgcgccgggtgaatacggccatcctgaacgagtttatcaagagcgattcttgccgtctcccgtctgatcggatcaaatccggaaagaatgactgcttcaggtgtgtcatcaataatcaggtcaatacctgtaagcgtttcaagcgtacgaatgttacgcccttcacggccgatgatacgtcctttcatctcatcattcggaagattgacgaccgataccgtcgtttcggcaacatgatctgctgcacagcgctgcaaagcaagcgacagaatgtttttcgcctttttatctgcctcttctttcgcacggttttcggtttcttttgtcatgatggcgatgtcatgtgaaagctcattttcaacccggtcaagaatgatttgtttcgcttcatcccgtgtcaggctcgaaatgcgttcgagttctgactgctgcatacgaatcatctcatccactttgctttccatctcttcaatatgttgttgtcgttcattcagagaatgatctttcttctccaacatcgcttcccgtttatcaattccttcatgtttacggtcaagattttcttctttttgaagtaaacggttttcttgtttttgaagctcatttcgtctttcacgaacttcctgttcagcatctattcgaagtgtatggatttcgtcctttgcttcaagcagagcttcttttttcagtgcttcagcatcacgctttgcatcttcaaggatttgctcggcagcaccgcgtgcgcccgcaatctttgcttcggcaatggttttacgaacatagtagccaacaactaaaccgagcagagtcagcaaaatggagatgagaaccgtcattggggtcatactttcacctcctcttgctatgaacttggtttttgcttaaataagtgccggcatgtacattgtctgattttctcaacatacagaaccttcacagggaatgagtctctcatgcccttgtcaagtttaaatggtttaacaatcatgttaaaaaaacaaatgttacaacttcattgtaattgtgtcggaaatacttgtcaagcttgccagcttaacgattcgccttcagctcggatcttcgcccatgtatatatcataccataccttcatccgcttttcgtgaatgacggctctgttagtccgcctggttaagcaattggtaaattctattgtttacctgtcctaatttggcgttattctgaatgtttgacagtaatatgacatatttgcttgccgaatggctgaagctgttcaaaatgttgtaaccgggcataacaccgtgattggaatagcttcccggatcaatgtaaaaccccatgccgtaagcggcactgcttcctgctgtaaacatttttgtgaagctttcttttgaaaggagcgtgccatttacgatccctttatcaaatttatagagatcttcagcgctcatatacatgtcgcccgccccgtacagctgcgataagtccagaaggtgcggcgttacaagactgccgctctcatcgactttgtagccgacggcaggatatttggctttggcaaatgttttgtaaaatccggcatgcttcattccggccggtttgaacacgtgttcttttatatattgttcataagactccccgctgacttgagatacgatataagcaagcactgaatagttggaatccctgtaatcccaaaccccgggctgccgtttaattccgcggtattctatatccttgattaaatcaattggagaaatcggtccctgtccctcaatatgcccgtttatgccggacgtatgattgagcaggtttttcaatgtaatgcgcgtgccgttaggaaaattcggcaagtatgtactgacggggtcactcgtctgcagcagccctttttcttcaagctgcaggacagccgtcgcgattaacgctttttgtgaagaaccgatataatatgatgtctccggattgtttttaattttttgttttcggtccgcatagccaaagccttttttcagcacaacttttccatcttttacgatcattgccgtgccgctgaacccgatctgttgcaggtaattgctgatctgtttattgtgatcgattgatttaggtgttttctctttttgcgtcttttcttttttctgttgagtctggtcttttgaagtatcagattgagcggcgggagcgtttttaacggattccttctcccggtgatgcgccgtgacggtccagatcataataaaaacagtgacaagcagcagaaaaagaaacagccctcccgttttcatcagcttcttctttctttttttgttaattcttgtgcggcgggggctcgtcatcttttttcctcctcagatataatttcaactttcgccatgatgttagacgagtgaagggtgaaaaaagttgtaacatttcagataaaattttccgaaacagccagtgtttttttaaacacacaaaaaaagagcggaaattgcttattccgcccttttgatcgtgtttttattcttctaattccatctcttcctgagtttcttccgatttttccgtaacaccgttattgtccaaaccgtaatgttcacggatttgttcctgaatcatcagcatgatgtctttattttcttttaagaactgcttggcattttcacggccctgaccgaggcgttcttcttcataagaataccacgaaccgcttttttgcacgatatccagttcagttccaaggtcgatgatttccccttctttggagattccttcaccgtacataatgtccacttcagccgtacggaacggaggagcgactttgttttttacgactttaattctcgttttattccccatcacgtcgttgccctgctttaattgctcggcacggcgcacttcaaggcgcacggaagaatagaatttcagcgcgcggccgcccggtgtcgtctccggatttccgaacataacgccgactttttcacgaatctggttaataaagattgcgattgttttagatttattgatggcgccggaaagcttacggagcgcctgagacatgagacgcgcctgtaaaccgacgtgtgaatcacccatgtcaccttcaatttcagcttttggaacaagcgccgcaacagagtcaacgactacgatgtcaacagcgccgcttcgcaccagcgcttcagcaatctctagcgcctgctctcccgtatccggctgagaaagcagaagctcttcgatattgacaccgagcttttgcgcgtaaacaggatcaagagcatgctcagcatcaataaatgctgcctgtccgcctttttcctgaacctcagcgattgcgtgaagcgctacagtcgttttacctgagctttcaggtccgtatacttcaataatccgtccgcgcgggtatccgcctattccgagagcggtatcaagtgcaagggaaccgcttggcaccgttgaaattcttgtatccgttttttctccgagcttcatgatggaacctttgccgaattgtttttctatttgcttaagagccatatctaaggctgcctgacgatcactcatttattttttcctcctttatcttgccactacatatactataccttgtttactggcatttgccaagaaaaaagcgaacgcatattcggattttttccgcgttcgcttttctgcaaaagagcataatttcccttgtaaaacttaaaaatcagagaaaacgcctctttaaaactttatttttgatccagcattttcaaaatgagatggcagccgtatttagcggcgcgctttctgattccggttcttgagccggcaaagttaaattcgtgcacctcttcttttccttccgccgcaatgccgataaagacgcggcccggcgcatgcccttcctgcgggtcgggacccgccaccccggtaaagctgatgccgatatcgcttccggtcagctttctcacaccggctgcaagctctttcgcacactctttgctgaccgctccgctttctgcgagcgtctcagctttcacgccgagcacatgctgtttcacgctgtcggaataacagacaacgccccctgcaaatagttgagacgcaccgcttaaatcagtcacccactctgaaaacaggccgcctgtaaagctttcggcagaagaaatcgtaattccgttttgtctgcatgcttttgaaagctccttcaccagagacgtatcatcatatccgtagaaaaattcaccgacacgttctaaaatggcggcttccgtttcttttaaaagccgttctgtttctttttcgtcggcatgtttcgccgttaaacgcagcgtgacctctccgtcagcagcgagcggcgcaatcgtcgggttcgtctgcgcatcaatgatatcttctaaatcagcttcaagctgggattcaccgattccgaaaaaccgcagcacggttgaaacgattttctcattagaaccgagctttttaagaagcagcggcttcgcttcattttcaaacatcggacgcagctcgctcggcggcccgggaagcagcatataaagccttgagccgtgctctgcaagcattcccggcgccatgccgaaatgattcgccaaaacgtctgagccctcaatgacgagcgcctgtttgcggttattcggcgacatggtccgttttgttttcgcgaaatattcttcgatcgaccggaatgcttcgtcattcagaacgagcggacgccccagtgtgtttgcaatggtttctttcgtcaaatcgtccttggtcggtccgaggccgcctgaaaaaataatcaggtctgagcgctcttcggcaatgcggatgacttgcttaagccgctccggattgtcaccgacagcggtatgataaaacacgttcacaccgatttccgccagctctttactgataaactgcgcgttcgtattggcgatctggccgagcagaagctccgagccgactgcaatgatttctgctttttttgctatttccatctttaagtccttctttcttagttagatgtttttaacgcatcccagttcttcgcaaaataatcccagccggaaatgactgtgaagagcacggccacccataaagcgatatcgccgaacgggaaagaaacgagctcaaacggaagattatgcagcaaaagcgcggcaacagcgatgatctgagcccatgttttaattttccccagcatattggcggctacaacttcccccgttcccgccagcacaagtcttaatcccgttacggcaaattcgcggctgatgatgatgatgaccatccacgccggcgcaaggtcaaattgcacaagcgtaattaatgccgcggacaccagcagtttgtcagccagcggatctaaaaatttcccgaagtttgtcacgaggttcagttttctggcatagtagccatccacccagtcagtcgttgatgcgataatgaacaaaacagctcccgtaagatgcgcgaccggaatcgattcatcccctatatgaacgctgccccactgaaaaggaacaagcatgataatcataaatacaggaattaaagcgattcttgccagtgtgattttattcggtaagttaaacataaagcccctccaatatatgtactcggacgtgaagaaaaagtcatcttaatcgttcagatgacttttccccttttattttttcatcttgattgtgatggtctgcgccatcacatcatgcggattgagttcataggacagaacctctccgttgattttaattttcaggttaggggcatagcccgtgcggatttcaatctgcttttgatccgtgacgtcttttttaaaggtttcgcctttttgcagcgttccttcttttaaagaaccgccgctgtcatcacggacgcggatccatgcgctgtcagaagcaatcagttcaagcttatacttatctgccccggagacgttgtatgaagaagccgagccttccgttccggccgctttgatctccgtcttttcactgcttttttctttcttctgctctgacgcttttgtgtcctttttgtcttttttgctgtcagattgcgcttcgtcatttgtattgccgtcgtttttcagcgcagaatccttaggaatctcatacttgctctcactttgggtgactgccttatctccatctgtctgcccggatttgctcattccgagctgaataatcgcataaatgatcgcgatgacgataatgacaccgatgacgacaaggacggtcggaagccattccgccgcctttgaagcggacttaggaagctccctttgcatggcgagaccggagattttttccgacacatcatcatggtacgtgttagggatgtcttttttatattcttcaaataactgatctgaatcaagcccgacagcttcagcgtattgcttgataaacgcccgcacataaaaattgccgggaatgacgtcataattgccttcttccagagcggttaagtatcttttctgaattttcgtcgccgcctggagttcatccaatgacatccctttttcctctctggcttctttaagccggattgctaattctgtcacaacaaacaccttccaatattaaaaatcaaagcttgaaaaaccggtctgatcaaatatttgcggttcttctgcatgttcatatgtaataacttcgtcaggatcatttctgagttcgataatataatcgaaatcatcgagcgtatactccgaattttgaacaaaaatatcggggtgctccacgacctttgtcgccggaagccgcataatttcactgacgagctgaagatggcgctcagatccccgtcttgtcgaaacgatgccgtcgaggataaacacgttttccgtgctgtattcatcggcaaccagctggctccggatcgtttgttttagcagcgttgatgatacgaaaagccatcttttgctggcacaaacgcttgacgcaacgatggactccgtttttccgaccctcggcattccccggattccgatcagtttgtgcccttcttttttaaacagctcggccataaagtcaaccagaagaccgagctcgtccctttcaaaacggaaggtttttttgtcatcggcatcacgctgaatgtatcttccgtggcggactgcgagacggtcgcgaagcctcggttctctcagcttcgttactttaatggtctccattgtttttaaaattgattccaatcgtttaatttgatctatatgccggcatctgagcagcattccccttctggaaaggtcgacaccgttaattgtgacaatattaattgacagcatcccgagaagagatgaaatatccccgagcaggccggggcggttcacttgaatttcatattcaaaataccattcgagctttgccaaatgatataccccctccattgtggcaaatttttaccttcctttatcataaaacatttttctctaattagaaagaagaatgttgctctatagaggaaaacataaaaaaagagaggagaaatcccccctcttaatgagtgctgttattttcaacaagcttcaccatcatatttgcgatggcgcgctgttcatcttcagaagcaacgctccaaagatcagcaagcactttttcctgatggtttttcgagtcgacttcgttcgcaaggtaaccgccgatttctgtagcgaggtcagtgatcgtttcatcactcatccctttttcctgcgcatagttcaatctgtcaccaaggaaattcttccaattatcccagttttctaatactgacatgttgggttcctccatttcatctgttgttacaaaattattttgtccgtacagatgcaaactatacacacattttttcagcagtgccagccgccgtttacggataatatatgccccgtaatataggaagccttgtccgataataaaaaggccgccgcttcggcgatttcctccggctttgccagccggcccgcgggaatttcctctgccaacgcttctttttcatcagacgtgaactgatcaagcatatttgtgtcaacggcacccggcgagactgcattcacgcggacgccgctcggagcaagctctttggcaagcgctttgacgaacgaatgctgcgctcccttgaccatgctgtataatacctcgcacgatgcgcctgtttctccccagacggaaccgatcgcgacgatgcccccgctttttttccggatcatgccgggcatcagattacgcgccaaaaaaaacggactcgttacatgcagctgcaccatctcccgcgccgtgtcatccgtaacgtccgtaatcaggccgaaatgacttttgccgctgtttaataccagagcatccacaggctgcttaacggaacggctgagtgtctccgcgccatccggtgaggacagatccgcctgaataacggaggcttttacgccgaatgatgtgctcagcctttccgcaagcctgtgtgcggcttccttattagaatgataatgcaagaggacgtcatatccgttttttgcgaggacttcacttatactttgtccgattccgccgcttgctccggttacgagcgctgtctgtttcatcaatcaatactccttctttccccagaaaaacatccctcagggcgtgagggatgtttttgttatgattttggcacgactttgcagactgtcagcctgtcttctgatatttcttcttcaatgacccgctttacgtcatccagcgtaatctgctccagtacggttacgacatcaaacagactcatatctaaaaaggcgtagcgtgtgaattggttggcgatatattcaggcgaattgagcgcttttaagaatgacccgatcttcttttttctcgcaagatcaagtttttccgcagtcacggctgatgctgcatcaagcagcatgtgttttaattcgtcagcgagcttatccggctccggtgtatctcctccgacagaggcaaaaccgaatccgtattcagccgtgtaatcaaagctgaaggtctcatcaatgtagcctttgtcgtacaagtcaccgtaatgcggtgagctttttccgaagagacattcaagcatgaggttcatgctgagctcgtgcttcaacagctcctgccccgttttataagggtctttcgcctttaaaccgaccagacattttgagccttgcacgttcatttttaattcctgctcccggcggaaaaccgcttcctgctcctgaacttcttcacgtttgatttcaggctggtctgtaaacggctttttctcctggttttcccgcacctggctgatgaccgcttcaggatctacgggaccgacgataaagagcagcatattgctcgggtgataaaacgtttcatagcactcatacagcagatctttcgtaatatgagagatgctctccaccgtcccggcaatgtcaattttcacggggtggtctttatacatattttcgataaggccgaaaaacagccgccaatccggattatcatcatacatattgatttcctggccgatgatgcctttttctttttcaactgatttttccgtgaaatacgggtcctgaacaaaatctatgagtgtttccaggtttttctccacattagaagtgctggagaacagataagcggttcgtgtaaatgatgtaaaggcatttgccgacgccccttgcttactgaagtcctgaaacacgtcgccgtccgctttttcaaacagtttatgctccagaaaatgcgcgattccgtcagggacgtgtaccatttcttccttatttaaaggaacgaattgattgtcaatggaaccgtactttgtcgtaaacacagcgtatgttttattaaagccctgtttcggcagcacatagacatcaaggccgtttgccattttttcatgatacagcgtttcctgaagctgttcgaagtttatcggtttagtcaagatgctccccccgtcccttttaagaaataagtcgtatccagcttaatgttctttccgacattgataatgtcctcttttgtcactttctcgatattgtcaaggaatttttcgatcggtatctctacttgggctgaggcctgctgatacagaaattccgctaaaccgtatgccgtatcaatcgtttctaatacttgatttttaataacggctttcgtttgggcgatatcatcttctgaaaagtcaccgttttgcatagcctgaaactgttcttcaatgatggtgacggcctgcttgtaatttttcacctcaatgcccgacatgaccatcaaaagccctttgaagctttccacccttgaggccgcataataggcgaggctcgctttttcacggacatttataaacagctttgaatgagagaaacctccgaacagcccgttaaacacctgcaatgcaggataatccggatctgtatatgtcgtattggtccggaatccgatattcagcttgccctgcttgacgtcctcttcatcaatgacttccttcggatcgggctgttcattcgccgcgcttctttcaaaaggctgcagctcccgttcttccgttttaaaatacgtatcaacggccgttttcacctgatctgtatcaacatcgccgatgacgtacaggtccagctggtcttcgcgtatggctttttgataggcttcatacaaatcttgcggtgtaatgtgttcaacatcatcgaactcgccgttgacgtgaagcgcatacggttcgcttttgcacatttcctgaacgagacgcagattagaatatctcatcttatcatcatatacggcttgaatccgctgtttcagcgtccgtttttcctgcgtgacataaaggggcaggaaggcgccgttttccaaagcgggcgaaaagacaagctctgataaaagctgaaggcctttttccaataacggtgtgcggtccttcagatacttttcattaggaatctcaagtctgaacgtaatgacatgacgttctcccttttttgtcagatcagctgaaacggatgtgccgtacagctcatcaaaataagaccgcagatcagcggttttcgggcggctttctgttccgcgcagaagcacatgcggaaacagcgccctttttgttacgagctctttcgttaaaggagccagcattttaaacgtcagcgaaacggttttaaatttctcggtctttacgatgtgggcggtgatcccgccgtgctttgacttcatttcatttacgtaagtcatgtgaaacctccttcgttcattctttcatagtatgtattatgaccaaatttcagcattcgcaaaaaagagtgcgcagatgtaattatatcaactggaggatttataaggaaacaaaaaacctctgcccgaaaacaggcagaggcattgaacgttattttttcaaattgaaaggccaccagttggctcttccgaatattttcaccatgaccggtacaaaaaacggaaggacgacaattgcgtacatgagaaggcctgttaataccacggttgcaatctgtaataaggaaagaacgcctgacggcagcatggccgcaaaggttcccgctaaaataatggccgcagaaatgatgacggaacccatatttttcatactgctgatcattgcgggttccgttccttcttttttcagctcattaaagcggtccattaaaaagatggaataatccacgccaagagccatcaaaatgacaaagccgaagaacggcacggcccagtttacgcccggatacccgaagaagtgtgtaaagatgtattccgtcacgccgatggatgcgaaatacgtcagtacgagcgacgccactaaataaacaggcataatgagggagcgcagcatcacgatgagaatcagaaaaattcccgccagcataaacatggccgtccgtttgaagtctgaatccgatacttccttcagatcggcattcatgctggagactcccgaaacgccgaaggaagcattcttcagatccgtgttcggaatggccctttttacgctcgctttgatcgcttgaatatcttgaatggccgtatttgagtaaggattgttatcaagaacgacggtcaattctgtcgtttttctgtcatctgacatgtacgtattaaacacgcttgtgaaatcactgtttgtcaacgcgtctttcggcacaaaccagcctgtcatttctttgtctgacgccttgtgaagctcacccaggtaatcattcgcccccatcatgccgcttgatactttcttaagcccttttacactgtcgttaaggccggaagaaagttcgctgagccgggaagaaaaatcaccgagaccgctcttcatttttttctggccctcggcgagctgtcctgccgccgattcaaggcgcggcatttgtcctgcgagagccccctgtccgtctgacacttgctgcagaccgttttcaatactggtcagaccgttgatcattgcgttaatttgagtgtcaatcttcttctgagcggctgccagtcgggcaaattgtttttccgcttgctgcagatgagccttttgactgtcgacctgtttagaaaacgcttctgcatccgcgtttgccttggaaacggctgactgtacacccgtaaaggccgatttgatttcttggtaagagggatcggttttgactgacggtattgacgcttccaattttgcaaacggcagccgggcaagctgcttgttcaaatcggcaagctgtctgctggcttcatctttcatcggcaggacggtttttaccaattttaaagcgttttgcgtttctgaagcgagaccgctgttttgtttgagctgtgaagtcagcatttgtttttgctcttcaatccgctttctcatctgggcgacgccggctttattctcgttcacgccagcctgcagtttattcaggttttctcctatatcagaaagcccggatttcagagacaatgttccgtcaataagctgattgacgcttttgcccgactcttcgatctgcggctgtgaatcagctaacgactttgcggcatgccctaatccgtccgtgattttttcaagtcctgtattgcctttatcaagcccttcttgaagctgctttgcctgatttgtgacaaataattgattcaatccgtttccagcggggcgcgtggcgcttctgaccgtttttacaccctctgttttttcaagttctctgctgattttttcgatatcaatcaggtgtttttcggtatttaatgtctcatcatttttgatgacgactgtggccggaagaagttctcccgggccgaatgcgtctgaaatcgtattaaacgcgcggacggattcatatttatccccgatttcgtcaagactgttgtaagacagcgaccctttgtaaagaaggataggcgggacggtgaataccgcaacgattgcaagactgatgagcggccttttaaatgaaaaccgccctgacgattcccatgctttgctttgaggatgcgaaatatcgcccttaacaggccaaaacaggctttttcctaaaacagccataaaaaacggcacgatcgtcatgagcgcaagcagcagcaccgcgacaccgaccgcaacggccgctgccgactgatacagcttaaatgtcgcaaatccgatgcaggcaaatccgatcagcaccgcaccgccgctgtacaaaaccgtctttccggccgttttgtaggtgacgacgatcgcttctcttatatcagcgccatgcgacagctcttctttaaatctgctgagaagcagaatgcagtagtctgtgccgatcccgaacataatcgcaaccataaaaatctgagtaaaagttgagagcggaaaattcagctgatcgactaaaaatgcgacaatcgactggctgactaaataagatatcaatactgataaaagcggcacgaacggagcgaccactgaccgaaatacaaggatcagcacgatcaggataaaagcgaccgttatatattcagtctttttcaagccgtcctgtgagctttttaacacatcttcgtcgatcagcgattggcctgtaatgccgtatgatacgccgtacggtttcagctctttatcaattttattttttatttcgatgatatcgtttttggatgtatcaagctgcagctgaacgagcatcgtttgtctgtcttttgagagcagctgttttttaatatcgtcatttttctccccgaagtatgaagtcaccgttttaatctgaagcgcttttttatgttcagacaaagtgctgacggcttcttccagacgattttttttgtctgtcattaagcctttttcgtgaaatacgatgacggcagaagaagacggtgcatcggaatcagacatttcatcaagcaattcatgggcgtaagaagaggaatatccgtccggtacggaaatctgccctttctcccgtgtcaattcagccatatcaggcgctgtaagcataaatatcaccgttgcggcgacccacaccgcggcgatgatccagcgggctcggataatgtttttcattatgtctgctgatcctcctcagtcatcatcaatcgatataatttttcatatgtatttacgaacatttccgcctcgtcttcatcaaaatacataatatatgatcggacgagttcctcaatccgccgctccacacggtgaaatacttccgtccccttttccgtgacatttaaaagtatgctccggcggtcgctttggctgcgttctctattgatgtagcctttttcatacaggcggttcgtcatagatgtaatggcgcttttattgacgtggcacaccgcggccagttcaattgatttgcaatccggattgagcataatatagcggaggatgtaatattgatccaatgtcagttctttgttcactttttcagcgataatgctgtcaattttttttaagacgtgcaggtatacatcggaataacgctgaatcagctgctttactttttcttcatgcaccttttccccctccttccgatagttaatatgtttaactattaaaaagaataacgacttgacggtatcatgtcaatcttcaaaataaaataaaaaaagacagtgcagattacaccgtctttaatgattcctttttttcttttgcttgtgatgagatatttaacagcgctaaaaatacagacacaatgccgcaaaaagcggataaaataaaaatcagccagcctgcatttgacatcagggcagcaaagatcggcggtcccgccgctactccgataaaccgcatgctgttataaaatgaggtgatggttcccgattcctcgttgtctacgccttctgtgatgacagcgtctaaagccggcaatgccattccgataccgataccgctgacacacaaaaagataaataataaataaaaactgtgattccaccataggccgataaacgacagtgtcacggcactcattccgaaaacgatgcaaaacttcattttgccttggtcttttccgattttcctgcctgctatatatgaactgacggatagaaataaaagcgggattgccaaaagcgctcctttagccacaccgtcaatgccgtatttcttctccagtgagtctgataaataaaaaagaaccccgaacagcaaaaacataatcacgcagccgatgataaaaaccgtaaagagccagcgtccgtcacgcttaaatatgcggccgacatttttcacaaattcggaaatagaaggcgcttctttttgttcctccggctttgccaccaaaaacaatacgagaaaaaaactgatgagcgaaaaaaacggaatgaaccaaaatggcataaaccaaaaccatgcagccaagagcgaaccgagaatcgggcttattactttcccggcagtgttagacgtctcaatatcgccgagccccgcggtaatccgctcatcatcccctttgaataaatcaccgataaacggcatcactacaggagccgcccctgccgaaccgattccctgcagcacccgccccgccaagataatgggataaggatgcttgaacgcggtggaagctatcgcggcaagcgctccgcccgcaccggctatgagaagacaaggcagaagaaccttttttcttccgaatttatcggacagatatccggcaatcggaatacaaataatcgccacaatcgaatagaccgttataattaacgatacttgaaaagacgatatggacagcttcttttcaatcatcggaagcacaggaatcagcatggaattcccgagtgtcatcacgagcggtacagaagccagagcaatgatatttttcgttccatttttcttcttactcaacttattcacccattcactatacttggttgtttcctgttttattgtgccttgcagaaaacaaagtatgtactgaaacggcaaataaaaaaacagacacatgacgcgtctgtcttaaaaacgttttcttacaacatgaaaactgaacttatcagcccggaaataatttaatgaatacagcacaggttcatcattctgattatagtgggtttgcttcagcaataaaagcgccgtctccggctcgcattccaaaaccggtgaaatcgtatcgtgatatccgatcggttcgatatcagcaacggcatagctgatcacagatccggagtttttttccaaaagatcaaaaatagactcctgttcatgacagaaagaattcggcagaatgtgcatcggaatcgtatctaaacagtaaacgaccggagtgccgcttgccgttctcacgcgttccaaataaaaaagctcctgctcgggctcaagccggaatctagcgatatcttcatcagacggcgtgatgacctgagacgacaaaaaaatcgtacccggcaccatgttcgcctgctgaatcgttttcgtcacgctgttgagctgttcaatacctgaaagaaacagcggttttgtatggacgaaagtgcccacaccgtgccttctgataatcacatgctcctcttcaaggatacgcaaagcttcacgcagagttgcccggctgacacccattgattttgaaagctcaaattcagaaggaagcttttccttttcggtgtaaattccgttttgtatatcctctttgattcgctcaatcacttttagatacaagtgacgattgtcagcttttgtagacatgtttcccctccgtaaaccactttcataaattattgaacaattgggacaactatatcatgttttgataaaaaaataaataggaatgattttggtgatatcattttcagtgaaaactctctcctttttaagaagagagctcatcatattgttccttagataatagtacttccctcggtttgcttccttcatacggcccgacgacgccccgttcctccattgcgtcaatcagacgggcagctctcgtatatccgattctgaaccgcctttgaagcatggagactgatgccgtctgcatgccgataatcaaatcgaccgcttcgtcatagagatcatccgttacttcactgtgtgtttccgaaacttcttccggaatcatctcttcttggtactgcgctttttgctgcgtaatgacatgatcaacgacatgctcaacctcttcatcggataagaatgccccttgcacacgcaccggcttatttgcgcctacaggcagaaacagcatgtctccgcgccccagaagcttttcagcgccgcccatgtctaaaattgtccgtgaatcggtctgagatgagacactgaaggcgattcttgacgggatgttggctttaataacaccggtaataacatcgactgaaggccgctgtgtcgcgataatcaaatgaattcccgccgcccgcgccatctgtgaaagtctcgtaattgaatcttccacgtcggaagaagcgaccatcatcagatcggcaagctcgtcaacgatgacgacgatgtacggcagctcaggctgcttgacttcttcttcggcatttgaccgcttaatatgatcgttatagccttctatatttctcgtacccgtatgggagaacagctcatagcggcgctccatctcattgacgacctttttcaaagcctgcgaggcctttttcggatctgtcacgaccggcgcaagcagatgaggaatgccgttatacacattcagctcaaccattttcgggtcaatcatcatcatcttcacttcatgcggtttggccctcatcagaatgctcgtaataataccgttgacacagacgctttttccgcttcccgttgcccccgctacgagcaggtggggcattttgttcagttcggcaagcacggcttccccggaaatatttcgtcccaagccgatcagaagctttgcgtccggcttgtcattgagcttggattcaagcacttcttttaacgaaaccatcgcaacttcagcattgggcacctcgatgccgattgccgatttacccggaatcggcgcttcgatccggatatccttcgcggcaagcgcgagcgcgaggtcatcgctcagattcacgattttactgactttgaccccgacgtccggatacacctcatattttgtgaccgccggaccgagatgaacctgcgtcactttcgcctttacgccaaagctttgaaaagtccgttcgagttttcttgcattctcgtaaatgtttttcttatcggtctgctggccggtatgtttcgggtcagccagtatgtccaatgaaggcatttgataatctttattttcaagctctgtaaacgtcatcggcggagccgcagccgtttcgccactgtcttgagcgccgccggaaggctcatcttttaccgcttgtgcagcctcctgagttttttccggaatcagcggttcgacgggctcttcctgacggtctgaaaagcttgaaataatcggctctgaatggatgatcggcgaaatgatttcctcatcctcttcctccggttcaggctcttcttttttcttttgaacccgtttttgttttttgcccgattttgtttttgttttcggcgaagacatattcgttctgaccgtcttcatatcctcaagaaatgcctgccattgaccgcggataaaccggccgacggggctcgtccactttttgagcgtttcctgcagtgaacggcccgttacaagaatcagccccattaagatcagcacgatcgccatgatctgtgaacccgttgatgcaaataaaaagtgggaagctgcaaacagtaccgcgccgatcatgccgccgcccaaatcaggggaagcagcctgctgtttcatgtcaatcataaacagctcccacgtgttgccgatgacacttgccgaccgaatcgacccgtgatgagacagatttttaaagagctgcacgtgagacagcagcaatatactggcgataatacagtacagccctgcctttcttctcgttaaaaggcttggactcttctttttccaaaacagcgaaattccgagaaggaagagcgcaattaagcataaaataaaccactctccggcaaaaaaacggaacaagtacacaaatgtctgtcccacaacgccgagctgcaaaacagcaataattgagattgcaacacagagcagtccgcttagttcgtattttagattgagcttactctcttgtttctttttagatttccgttttttctttgccacactcatcaccttactgcgttaaaaaatgtaaaatcatacatcatgaagaaaagcagccttttgccggctgcatttttctgtaggattcccctattatagcatattttgcccccgagaaacggactgaatgccggttagattttcagcttgattttttgtcccggagcgatgtccggattcaagaaatccatcgggttcgtacttaaaatctgtacgacttcagcttcatttcccttcatctcaactagcagcggcacgccggcgtaatctacctgttcatgcacgctttgctctatatcctgaccgtaaacgacttcttggggcatgacggtataaaggatcattgaatcatccttccttcctcgctctttcgttcctcaatcagctgattcagcttttttatcgcctgtccgacgccgcccacggcatcaattaatccgtaatcagccgcatctttcccgactacgttcgtcccgatgtccctggttaagtttccttttgaaaacatcagctctttgaatttttcttcggaaatatttgaatgatgggtcacaaagttgacgacccgctcctgcattttgtccaagtattcaaatgtttgcggaaccccgataaccagacctgtaagccgaacggggtgaatggtcatagtcgctgtttccgcgataaaactatgatcacatgacacggcgatcggcacacctatcgagtgtcccccgccgagtacgattgagacggtcggttttgataaggatgcgagcatttccgcaatcgcaagccccgcttccacatcgcctccgacggtgtttaagatgatcagaagtccttcgattttcggattttgctcaatggcgacgatttgcggaatgacgtgttcatatttggttgttttattttgcggcgggagctggacgtgcccctcaatttggccgatgatcgtcaggcagtgaatattgctatcttgggacatttgcggcagagatgtctctcccagctgctgaattttgctcataatgctgtctttcgcatctgatttttcgggctgctgttcttcggtgttttccatacgatgatccattttatctttcaccctttccgaatgtctctttgtattatgaacaaagatgatgatttccatccgggacatgaacaaaaacaaagccggagcatcatgcgctccggctttgtatacattatacttccataatgatcggaatgatcatcggcttgcgttttgttttttcataaaggaattgattcagcgcatcacgcattgcttgtttcagcgtggaccattctacggcagatgtttccgtcgcttcagtcacgatagagcggacgagctcagtagcttgtacaattagaccctctgattctctgacatacacgaaaccgcgcgtaatgatctcaggacctgatacgaggttctttttctgcttatcgagtgaaatcacgacgatgagaataccgtcttgtgacaataagcggcggtctctcagcacgatgttgccgatgtcgccgactccgaggccgtcaatcagaacgtttccgtacgtgactttatccccgattttcacattctggccgcggaattcaacgacgtcacctttttcaatcaagaaaatgtcgctgcgtttcatgccgatctcttctgcgattttggaatgcgctttttgcattctgaattcaccgttaaccggaattaaatatttcggtttcagcaaattaagcatgagtttcaattcttcctgcgaaccgtgaccggacacatgcacgcgcttttgggcgaaaatgacttgagcgccggcgcgtgcaagcaggttgacggttttggaatatatcaattcatgccccggaatcggtgttgatgcaatgacaacggtgtctccttcttcaatgttaagctgcttgtgcgcctgcttggccatccgcgtaagagcggccagcggctcaccatggcttccggctgtaacaattgccacttcccgcttcggatattttttcacatcctgcacaggaataaacatttcatcttcggcttcaatatagccgagcttgcgcccaagctgaagcacgttttgcagattttttccggcgattgcaagtttgcggccgttctggacggcagcctgtatcacttgctggatccggttgatattagacgcgaatacagcaatgatgacacggttttctgaattgttcatcgcatcggaaatttcaccgcttacatatgcttcggacggagtataccccgggcgctccgcattggcgctgtcagaaagcagggcgagcacgccgctgtttccgattttggcaatttcgccaatatcacatgattggtgataagcaggcgtctggtcaaatttaaagtctcccgtgcatacaatagagccaagtgatgttttgaagctgactcccactgaatccggaatactgtgaatcgttttaaagaacgatactttcgttgattcaaatgtaatgactgatttagagtgaacttcacgcaaatcagcttttcgattatgcccgtactgcttgagtttttctctcagtaatgcaagcgtaagcttcgttccgtataccggcaccgacagcttgttcaataaataaaagacgcctccgatgttttcatcgtgcccgtgtgtcagaaagatggccttcacgcggtcagcccgttctactaagtaggaaatatccggaatgacgacatcaataccgagcatttcattttcagggtgcatcagccctgcatccactacaaatatgtctgagtcaatttcaatgacatataggttcttcccaatttctccgacgccgccaagggcgataattctgacgttttctgtatttttctttttcaaaatctgtatcctcctagtctcatacccgtccatcatcacttgttcctattataactgatatcaattttagaaaacaagaagaagcggaaggtttagggaaaaccaatatgtatacaaaacggtcaaactcacgataaaaatgagaatgaccgcgtattttaactgtataaattttttcttacagttcgctgatgacgctgctcaggctcagacgttcatcttcattcagcgggataagaggaagacgcacagatccgacatcaaggcctttcagctgtaacgccgttttgaccggagccggattaggcgctttaaagagctccttcatgatcggcagaagcttctgatgaatcagtgccgcggttgccgtctgcccgttcgtatagtttttaatcatctgctgcatgtcagaacctacgatatggctggccactgacacgactcctcttccgccgactgcgagaataggaagcgttaacccgtcatcacctgaatagacgtaaaaatcttccggtgtttcggcaatgattttcgtaatggcatcaagatcgccgctcgcttctttaatcgcagagatattcggtatctccgcaagtctgatggccgtttccggcgcaagcgaagcgaccgttctgcccggcacgttgtaaagcatcacaggaagagacgtttcttcagctatggctttaaaatgacggtacatcccctcttgggaaggcttattataatacggcgtgacaagcataacgcaatcgacgccggcttcttcagctttttttgtcagtttaatggagtctttcgtattgttgcttcccgtacccgcaataacaggcacgcgtccgttcacttctttgactgtaaattcaaagagtgcaattttttcttccgttgaaagtgtcggagattcgccggtcgtgcctgcgacaactaaagaatccgtgccgtttttcaacaaatagtcgattaatgtagacagtttttgaaagtctacattccctttactgtcaaagggggtaatcatcgctgtagatatatttccgacattcatttttttcacctcatcatgattcaatcacatttactttgaaagttcaaacacttcatgcagcgcatttacggccgttaccatatctttttcatgaacgagcacccatatcgtcgtatggctgtcggcagattgcagaatcggaatgcctttatcagaaagtgcggagacgatttttgacgtgacacccggaacacccattatcccggcgccgaccgctgacactttcgcacagctctccgtcactgtcggctcatatcctaattcagccaaaatgctgcgcgcggcttccgttttactgccggctacggtatatacgatttcactcggcgtaatgttaaagaaatctacgctgattccggcatttgccattgctttaaagacttcagtctgaacgttgtattgccccattttggcgggaaccttaaattgcgtcacatctttcacatgggcgatccccgtgatcagccgttcgaatacatcgctgccgatgttagacgaatgatgggacgtcaccaaagtgcctttgtcttttgaataagtggagcgcacgcggatcggcacctttgcctgcatggcgatttccaccgcgcgcggatgaatgactttcgcgccttgataggcaaggttgcagatttccgtatatgtgacgttcggaagcggcttagcattttccacgattctcggatcggctgtcataacgccttccacgtccgtaaaaatgtcgataaactcagcatctaccgccgcgccgagcgccgctgctgaagtatcgcttcctcctctgccgatcgtcgtcgtgtcgcctttttcagtcgctccctgaaatcccgcgacaacgacagcgtcatggctggcaagtgcagcgaaaagccgctctgttttcatttctataattttggcgtcagtatgctgggcattggttaaaaagccggcctgggctcctgttaaagctgcggcttttatgccgttttccttcagcatgctggaaaaaacaacggacgaaatcgtttctccgcaagacagaagcatatcctgctctctcggagaaatgtcggactggctgccgtaaaggagcccgattaaagaatctgtcgcgtacgggtctccttttcttcccatcgccgatacgacaacgacaactttataaccttcactgatggcatctttaatgtgtgctagcgcaagcttgcggcctttgtcatcttttacggatgttccgccgaatttttgaacaatgatcttcactattttcactccaaattagtctgacgtaacagaagagagcaggcagagccttactctcttctgttcgcctatagaaaatacgtttgttttatacgaggttcagtttttgcaggctttccgcgatttggactgagttccaagccgcgccttttaacaggttatcagaaacaacccacaaatgaaaaccgtttgctctgtccaaatctttacggattcttcctacaaatacatcgcatttgccgacgcaatcagcaggcatcgggtaaagctgctccgccggatcatcctgaagcgtaacacccggagcttcttttaaaagctgtttcatatcttcaacggttgcgtcatcacggtcaagctcaatgtaaacagattctgagtgccctgtttcaatcggcagtctgacacatgtcgcagccacttccagattcggcatatgcatgatttttttcgtttcattaatcattttcatttcctcaaacgtatagccgttatcttggaatttatcaatttgcggaatggcgttaaatgcgatttggtaatgctttttgtcgcctttaaccggcataatggacggttctgcgggttcattgtttaaaatcgcctttgtctggctgtacaattccttcgccgcttcattgccggccccggacacagcttggtaagtagatacaatgacttttttcaatccgtacgctttgcggatcggttcaagcgcagccaccatctgaatcgttgaacagttagggttggcgataatgccgttatgtttgtgcagatcaccttcgttcacctcaggcaccacgagcggtgtattttcgtccatacggaatgcgctggtattgtcaatcacgatggctccccgttttacagcctcaggcgccaagctttgtgatacgcttccgccggcgctgaataacgcgatatgaacgccttcgaagctttcaggaacagcttcctgcactgtatattcttcgcctttaaacgttactttcgtaccagcagaacgctttgaggatagtagtgtgagtgtttcgatttcaaagtttctgtcttccagtgttttcagcatttgctgtcctacggctcccgtcgctccgacaactgctacgtgtaatcctcttcccatctgtaaaactccttccgccaattaagcatcatttgttgaattgactttgcattttacgttttattttaccatagaatagtcacggattgaccgaatttttttattccggaatgattttctgtcatcatgattttttattcatgatggtgtacgagcaccggctgaacctgctggtgcaaaagagctttttctaccgtaatcggaaggagatccattctggcgacgagcgatgtcggttttttcacgtggtcgtcctggccgaacgggatgaaatatatgttttttgcagacatcagcctcattaaattcgttccgtttaaaccgagtccgtcgtttgtcgaaattccgagcacgaccgggcggccgttgcggatcgtggctttcgcagccataaggacggggctgtcagtcatcgcattcgcgagtttgctcattgaatttccggttaagggggcgatgaccatgcagtcgagcggaagtttcggcccgagaggctccgcttttacgatggaatcaatcgcctcaaagcctgttgcttcttcaatttttctgacccaatctcccccctccccaaagcgggtatcggtcgattgaacggttgacgtcacgaccggccggacttcagctccttgactgataagcgcctctatttgcggaaaaacttcctcatatgtgcagtgcgatccggttaatccgaatccgattcttttccctttcagagacatggttattccccctctttctttaagtctgccaaaagcttgctcaatacgttcgcaataatctgtccggctgttttcggggccacaattcccggaagacccggagcaagcagcgctttaatgccttgtttttcagcatatttgaaatccgttccgcccggacgggatgctaaatccaaaatcaaggtcttcggcgtcatgcgcgataaaacgctttgattcagaatcaagctcggtacggtgttaatgcagatatcaatatcatttacatgttcagtaagctcttcaagttgaaaaggagaaagccccatttccgttatacgggccaaatgagccgaactccgcgcgcccacttttaccttcgcccctaacgccgcaaacgtccgggcgatcgtcataccggtgcgccccatgccgagaacggcgacatttgatccgtgaatggtataatccgtatgctgaatcgccatcatgattgttccttcaacagtgggaatcgagttgaatatcgcgatatcgtcccgctcaaataatttcacaagcttgcggcccgcttcgctggcgatcccctcaagatacgcgttggagatgcctgaataaatgacgcaatgctccggtgtccgctcaagatagctctgctttaataccacttcttcatttgaaaaaaccgtggaaacaacgccttctccggtcgttgccgatacaggcaggatgatactgtctattttttgaaagggaatctcatcgattttgcatttgacggttcctgtaaaaccgtcatccaattggtcaaaccctgcaagataaatatcggcatgctgctctgtcagctttcttataatctcaagctgtcttgcgtcaccgccaatgatcgcaattgtcaatccggttaacatctgaaacgttcaccttctttacagttactggatcttttaagtgtcatcctcctcttcatcgtatgtgcgaagagaaagggcggtgaatgtacagcgtctttttcataaaaaaagcaccggctgtatgagccggtgcttgcaaaaaatgaataagatctactcttcgggaggcgtgatctcccccggaacgtctaaaatgatcatgtctgacccgattttttggatatggttccaggggacgcggatgtcgtggccttgttttcgcaatccgaaccattttaccgtcggtatcaacagcgcggtaatttgtccgtcctgttcattaatttccaaatcggtctggccgagcacgccgagccgctctgcccgtttaatgtccactatttctttacctgacagttcactgagcctcatgatagccacccccttgtactatatgacccggagcaaaaaaaaatgcctgccccgtatagaggcagactgcttttccgcttaagacgaggccggcatattgccggtcgggctgatgagcgatagtgcgtaatcatccgtaaataagcggcggctgaggccgttgacgctttccaggctgaccgcatttaattcagtgataatttcatccatggtcttatgctttccgagcaggagttcgtttttcccgttccggctcattttgctgtttgtgctctctaagctgagcattaagctccccttcatttgctctttgctgttttccagctctttcggggtgataccgtcacgttttagaaccgataacgtttcctgaatggtttcagacagaagtccgagctgattcgcgccggtgcctccgtaaatcgtcagcataccgctgtcttcataggaactgtgatagctgtatacagaataggccagtcctttatcttcacgcacatcctggaaaagacggctgctcatgcttccgcccagcacgttgtttaagacgatcaaatcgtaaatgtccggatctccgactttcaggcctttgaaaccgagacagagatgcgcctgttcggtgtctttttttctggtcagcttttcataatgaaactcaggctcgctgatgccgcttgctttgcccttcgcttcgtatgtaccgaaccatttctccacgtctttaatgaattgttccgttacatttccggcgacagaaatgacgacgcggtccggcgtgtaaaagtcatccatatgctgtctgagagaatcgccgttaaatgacgaaagcgtttcctccgtcccgagaatcgggtagccgagcgaatgattgccgtatgtcgctttgctcagcagatcgtggacaatgtcatccggcgcgtcttcatacattttgatttcttcatatacgacgttcttttcttttttgagctcatcttcgtcaaaagcagaatgaaagaacatatcagccagcacatcaagtgcgtagtttgcatgctcatccagcactttggcgtaatagcacgtatattcttttgaagtgaaggcattcacttggccgcctatccgatcgaaggattctgcgatttcacgtgcggacctggtatttgttcctttaaaaaacatatgctcaagaaagtgcgaaataccgtttgtatccggcgtttcatgacgtgaccccgtcccgatccagacgccgattgccacagaccgcaccgttggattattttcaagcacaactcttacaccgttttggcatgtatagcgttttatcaagtctgttcctcctattcaaagacaggcaactgccgcctgctacttcatcagcctgttttcatccattaagtcagacactgagccgagcgcgtagcctttttctttgatttttgcaatcagtgtatccaggcttttcgcagtcggatcagtcggatgcattaaaatcatggctccgttatgtattttgctcaacacccttgtttgtaaaacagcgggagacggtttttgccagtcaatggtgtcaacggtccacatgatggtgcccattcctttttccgccgcaaggtcgaccacggcttttctgaagctgccgcttggcggcgcaaaccatttcggcttcatgccgagcgtctcgctgatttgtgcattggttttgtcaagctgttcggaaatgcttcctgaagtcagtttgctcatatcagggtgattgtatgaatgatttccgatttcatgtccgtctgccgctatttttttccccagttcctgattgtttttcagccatttcccttcaagaaagaaagttgctttgacctggtgctgcttcagaataggcagcatttgctccacgtattcatttccccaggcgacatttatcaggaaagcgaccatcggtttgtcgggatttcctttataaatgggttcgggcgcgagagaatcaagatggactttcggttttacctgctcatagacaaggccgtcttcgtgaaattctccgtcctttttcatttgtttataggatttttccacattgacttttaaaccgttatatcccggtatattcttccatattttatcaatccgcgcgtcttgcggcttcacttcatactctgacgctttttgcagtaattcttcatagagcggatcttttgatgctgacacagttacagcgtcttttttcattgcgtctatgtaatcaactgtatacggattttttaacatttcaaacgaaacaaaaaaaagaaataaaaaaacggcaaacggcacgaattttttcaacatgtccttcccccctcaccacacattatgtatgaggaggacaaggtagaacccgtctgttgtctttctcaaaataaagaagccgggtctcccaggctccttgttaggttttcatttaagattgttgttgttcctgttctttttctttctcttcgcgcagcactgctttacgcgacagattcactcgtccctgtttgtcaatttcagttaccttcacaaggatttcgtcaccgattttcacaacatcctcaaccttgccgacccgttcgagcgctagttcagagatgtgaacgagaccgtcttttccgctgaagatttcaacgaaagcgccgaatttctcaatccgtttgactttaccgaggtaaagctggccgacttcgacttctctgacaagatcttcgatgatttttttcgctttttggttgctgctttcatcagtagaagaaataaagatggtgccgtcttgttcaatgtcaatttttacaccggtatcttcaatgattttgttgatttgtttaccgctcggtccgataacgtcacggattttatccggattaatgttcatcgttaaaattttcggcgcatattgagaaagttcttttcttgattcaccaagcgtgctgagcatgctgttcaagatttccattcttccttttttcgcctgctgaagcgcttcttcaagaatttctcttgaaagaccttcaattttaatgtccatttgcagcgctgtcacgcctttttccgtgccggctactttaaagtccatgtcaccgagggcgtcttccatcccttgaatatccgttaataccgtatagtactcgcctgatttcacaagtcccatcgcgatacccgcaacaggggctttaatcggaacacctgcgtccatcatggcaagcgtgctcgcgcaaatgctggcctgtgaagtggaaccgtttgattcaagcacttcggatacgaggcggaccgtatacgggaagtctttttcatttggaatgaccggctcaagcgcacgctctccaagagcaccgtgaccgatctcacggcgtcccggtccgcgcatcgggcctgtctcccctacgctgaactgcgggaagttataatgatgcataaagcgttttgattcttccacgcctaaaccgtcaagaatctgaacgtccccaagggcgcctaatgtacaaacgctgagcgcctgcgtctgtcctcgcgtaaacagcccggagccatgcgttctcggcagaaggccgacttctgaagaaagcgggcggatttgatcaacgccgcggccgtccggacggactttttcttctgtgatcaaacggcgcacttcgtttttcacgagtttagacagtgtctgtttcacttttttaatcgtatcttcatcatgctcttcttcttcgaatttcgcgacaactgcatttttcacttcattaatcgcgtcttcgcgagcatgtttttcgtgaacctgaatggcgctgagaagatccggctccgcaaggctttttactttttcgctgagctcttcgtcaatttcatacagttcgatttctgttttttctttgccgactgctgcgacgatttcttcttggaatgcgatcaggcgcttaatttcttcgtgaccgaacataatcgcctcaagcatgatttcttcaggaacttcatccgctccggcttccaccatgttgatggcgtcttttgtgcctgcaacgatgaggttgatatcacttttttcaagctggtcaaccgtcggattgatgacgaatttcccgtcaatgcggcctaccgtcacacccgcgatcgggccttcaaacgggatatcggaaacgcaaagagcgagtgatgaaccgaacattgcagccatttcagatgagcagtcctgatcaacactcatgacaatgctgatgacctgtacttcgttacggaatccgtctgcgaaaagcgggcggatcggacggtcgatcagacggctggctaaaacggccttttcacttggacggccttctcttttaataaaaccgcccggaattttacctactgcgtataatctttcttcatagttaacggtaagcgggaaaaaatctagcggtttcggttcttttgatgcggttgctgtgctgagcactgcagtatcgccgtagcggatcatgacagcgccgtttgcctgtttggcaagctggccggcttctactgtaagctgtctgccggcccaatctatggtaaagacatgtttctcttgtcccattcgattacgagctcctctcttaatgtgtgaaataatcaattactcctattatgaacgaaatgaattgaacatatcaatgtcaaagtagtatgtaaaaggatttcattgtttttttattattatttttttcgctttaatacgataaaaaagcgggaatcctcccgctttttacgattatcgacgtaagcctagtttgttaattaactcacggtaacgagttacgtctttattacgcagatacgtaagaagattacgacgtttacctaccattttaagaagaccgcgacgtgagtggtgatctttcttgtgagtacgcaaatgctcgttcaagttgttaattgagtctgttaggatagcgatctgaacttctggagatccagtatcagattcgtgtgttttgaactcgctgatgagttgatttttacgctcttgagtaattgccatcctgtttcacctccatatcataattagccccagttacctagcaaccgtcggtgacttcggattgccaagcaatggttttaagactacgaaacatatgatactaaaaatcgcgcccatatgcaaatcttttagaagaaaatttgtgtacttttgatgttttttccgttatttgctgaaaaaacggatcgcttcttgtttgtcttttccgatctgagccgtcagttcatcgatgccgttaaacttccgttcgcttcggattcgtttgtaccactcgattttaacgtcttctccgtatacatcctgttgaaaattaaacaaatgaacttcaattgacggctgatcgggacgcttttcataaaaggtcggtttgtagccgatgttgcagacgccttcatacacctcgccttttatttcggctttcactgcatacacgcctgtcggcggcacgatataactgttgtgcaggccgacattcgcggtcggaaaaccgatggtgcggcctcttttatctccgtgaatcacagtgccccggacaaaatacggctggccgagaagagtgtgcgcaagttcaacgtcaccatcctgcagcgctgaccggatataagtggagctgatctttctgtcctgctcggtctgtttctcgacagtcgtgcatccggccttgccgtttaaatcgtccggcagcgtctccatcgtgccttttccgtattttccgtacgtaaaatcgaagcctcccacagcgtgccgcgcgtttaaccctaaaatatactcctcggcaaattgttttggagacagcgacgcaaacgcctcatcaaactttacgacatacagcacatcagcgcctaaacgcccgatctggctgattttatcttcaagcggcgtaatcagatcctttggctctttgtccctgcccaacacatgggaagggtggggatgaaacgtcataacggccagcgacaggcctttttcttcagctatttgtctggctgttccgattactttccggtgtcccaaatgaacgccgtcaaagtagccgagtgccatgacagacgccggctgctcttctttttgtaaatgatgcggatgagaaatatgtatcgtcttcacagaacggtcaccttttttcttattgttcgcttttttgcatgagcactttagccggtttcagcagtcctttttttgaagggtgcggcatataaatggccacacattctccgtcttcagtacagaccgctatacgggcgtcagctgtcaacgcagaaaattccgccgggatgtcaaacactgacccgttttcagctttcttagctaatgtatcacttatgacccatttcggcaaatgattgagcgctctttcaatcggcacggcatgctctgcaaccatgccgtctgaaacctgctgttcaagttcctcaaacgtgaaacactcatcaaggctgaaatcgccggaagcggtgcggatgagatgcgacatatgcgcgggatagccgagtttttcaccgattgtcaccgccaatgttctcacgtaagtgccctttgagcacgtgactgtaaagcggaatgatgctgtgtcttctttataagtgacaggggaagtgagcgcgatatcttcaatcgtgatattccgcttcggccgctccacttcaataccggctctggcgtattcatagagctttttcccgttaacctttacagcggaatacatcggcggcacttgctcctgcggtcccttcagttcgtctaaaacggctttgatatccacttctttcagcggctccttgacaggttttacgctgaccgtttctcccgtctggtcttcggtcgatgtggagaaaccaagagtgatctcagcatcgtacgtttttgacttgtcggtgacgtactcaacaatctttgtggcccgtccgacacagatcggcagtacgcctgacacttccggatcaagcgttcccgtatgtccgactttctttgtttttaacagttttcttattttcattacacagtcgtgagaagtcatgccgaccggtttatgtaaaaggagaactccgttaaccatatgtctttcgctcctttgttatcaattgtatcccgtaaaacgcagaaaagaggacagacgacactcgcccatcctctttccttgttattcagacggtttatctgaatgcagttcgtgaatcaatgtttcaatacgattgccgtactcaattgattcatcaaattcaaattcaagctcaggcgttttgcggagtctgattcggctgccgatttcggaacggataaaccctttcgctttctcaagccctttcagcgcctcctctttctttttctctccgccgagaacggagatatacaccttcgctatttgtaaatcacctgaaacgcgtacgtctgttacagtgagaaatccgattctcgggtctttcagctttcggctgataatatccccgagctcttttttcatctgctcgccgacacggtttgctctcatactcaattcaatcacctctaagttaaaaccactctgttctagtgatcgtccgttctatttcgggaaaggagtcaataaacgcgagtacgcgctggatctccttttccgcctgaacgtgagaggaggagacgacggcgattccgaagctggtccgctgccaagtgtcctgatagccgatttctgcggccgacacgttgaacttattctgaaccctcgttataatccgcttcagaacggctcgtttctcctttaatgatcccgcatcataaatgatgcattcacattccgcaaatccgatcactttctttcgatttcctgcatgacatacgcttcaatgatgtcgccttcgcgaatgtcattgtatttcttaattgtaataccacattcatatccttgtgaaacttctttcacatcatctttgaagcgtttcagaacgtctacttccccttcgaagatgaccacgccgtcacggatcaggcggagtccgctgtcacgtgtaatgtggccgtctgttacatatccgccggcaatcgtaccgattttcgacactttgaatgtttggcgcacttcaacctggccgatgactttttcttcgtattcaggatcaagcattcctttcatcgccgcttcaatttcttcgatgactttgtaaatgatacggtgaagacggatatctacattttcagcttcagccgtgctcttagcatttccgtctgggcgcacattaaacccgataacgattgcatttgaagcagatgcgagaatgatgtctgattccgtaatcgcaccgacgcctgtgtgaatgattttcacttttacgccttctacttcaattttttgaagagcggctgttaacgcttcggctgaaccttgaacgtcagcttttacgattaaattgatgtctttgacatcgccttgtttaatttgttcaaacagatcatcgaggctcagcttcgctttgtcgctgcgctgttcttccagttgcttggaagcgcgtgcttcaccgacagaacgggctgttttttcgtctttaaagacgaggaattgatcgccagcctgcggtacgtcgtttaagccagtaatttctacaggtgtggacggtccggctgttttcacgcggcggccgagatcattgaccatggcccgcacgcggccgaatgtatttccgacaacgatcggatctccgacattcaatgttcccgtttgaacgagaagtgtcgcgacagatcctcttcctttatcgagctcagcttcaataaccgttccttttgcctgacggttcggattggctttcagctcttccacttcactgacaagcagaatcatttcgacaagctcgtcaattcccttgcctgtaagagcggacagaggaacgaaaatcgtttctcctccccatgcttcaggaacgagtccgtattcagtcagctcctgcatgacacggtcagggttcgcgctttctttatccactttattcacggcaacgataatcggaacctcagccgctttcgcatggttgatggcttcgactgtctgcggcataacgccgtcatcagccgctacgactaaaatggtaatatcagttacttccgcaccgcgcgcacgcattgttgtgaacgccgcgtgtcccggagtatctaagaacgtgatttttttgccgttttcttcgatctggtaagccccgatatgctgggtgattccgccggcttcaccttcaacaacttttgtttttctgatgctgtcaaggagggtcgttttcccgtggtcaacgtggcccatgatcgtcacgacaggcggacggatttgaagatcttcttctttgtcagcctcttcatatttttcaagctcagtttcttcaagcacaatcacttcttctgtttctacaccgtattcagatgcgatcagttcgattgtgtctttgtcaagctcctggttaatggtagccattacgcccagaagcatcagttttttaatgagttcagacggctctttgcccagttcctcggctaaagctccgactgttaaagagccggaaaacgtaattttctcaggaagctcttttttcggcttcagcggtttttgctgatactgatttttgttgttatgattgcgtttgtttttgtttttgttgttgttattcttcttgtttttgttaaattgattattctgcacgtcattcttctttccgtctcgaattttgtttggttgattcccagcaggctgctgattaatcccttgcggcttgtttttgttcgtttccgcaggcttctgagatgtaacgccggcgccgccttttttaaatttcgcatcaagctgcttaatggtcttttcttcaagcattgccatatggttatttactactatatccatgtttttcagcgcagtcaaaatttccttgcttgaaacattgatggcttttgcatattcgtaaactctcattttagccattcgttcacccccaaaaatattaatcgagcaagctgatcagcttattcgcaaaaccttggtcagtgacggcgacaacgacacgtgattccttgccgatagagcggccgagatcagcgcggctttcgacttttttataaggcactttataataattgcatttatcggatactttttttgcagtattcgcagatgcatcttctgtcagcagaacaagttttgcacgcgcatttctaatttcttttataaccaagtcctcgcccgacacgaccttacgagctcgattggccagacccagcaagggaaaccattccattccagacatgttattttttcaccttttccgccagttccagcaattcttcgaaaatctggtcatcgatttgtgattgaaattgattttgcaatgtgtttttctttttcgcagctaagatgcattctttctcaagggtgatataggcaccccgcccgttcttctttccggtcggatcgactgaaatctctccttctttagaacggacaattcggatcagttcctttttaggcttcatttcccccgttaccacgcatttgcgcagaggaattttttttcgcttattcacctaaagtcacctcttattcatccgattcggctgtttcaggctccataaagagaggctctaaatcgtcatcttcttcatgctctctcggatagatgccaaggtctcttgcatccgtttcacttttgatatcgattttccagcctgtcagtttcgcagctaagcgggcgttttgccctctttttccgattgccagagaaagctggtaatcaggaacgatgacagtcgtggctttttcttcttcgctgacgatgacatccagcactttagacgggctgagcgcattggcaacaaattcaaccggatcgtcagaccagttgacgatatcaattttttcgcctttcagttcattgacgatcgcctgcacgcgctggcctttaggaccgacgcatgaaccgaccggatcaacgtcaggatcatcagtgcggacggagattttagagcggtcgcccgcttctctggcaacggatttcagttcgaccgttccgtcataaatttccggcacttcgatttcaaaaagacgcttcaacagaccaggatgcgttcttgatacatagatctgaggcccttttgtcgttttttcgacctttgtgataaatactttaatccgatcgtgcggtttatagctctcattcggcatttgttcattgacgggcagcagcgcttcaatcttgccgagagacacgtaaataaacttgctgtctaagcgctgtacaattcccgtcatgatgtcttcttcacgatcgataaattctgagtaaatcacgccgcgctcagcttcacggacacgctgcgtcaccacttgtttcgccgtctgcgcagcaatgcggccgaagtctttcggcgttacttctatttcaacgacatctccgacaaggtagttcggatggatgtgctgggcgtcgtcaagcgagatttcaagtcttgaatcgtatacctcgtctacgacatcctttcttgcgaacacgcggatcgtgcccgtctcacggttcagatcgacccgtacgttttgcgcctggttaaaatttcgcttatacgcggaaattaaggcagcttcaattgcttcgatgataatgtctttactgatgcctttttctttttcaagaatagtgagagcatctaatagttcactgctcatgttagcggtctccccccttaaacactaatacttcattcattaaaatgttacagctaatcttgcgttagctattttttcatacggaatattgacccgtttctttcttgttttgaccgtcatctctattgtaacagtttgtccatcgaattcagccaatttgccttcaaacacttttaaaccgtcaatcggttcgtacgttttcatgtacacatttttgcccagtgatttttcgaagtcggcttttttctttaatggacgctcggctccaggagaagatacttcaagaaagtagttctgggtgatcggatcggcctcatccagcttttcgcttaacgcttcgctgactttggcgcactcctcaatatcaacaccgttctcggaatcaataaacacgcgaaggaaccagttttgaccctctttgacaaattcaatgtctacgagttcaagctgaaggtcatccagtatgggctgagccatttcttgaacggtatcagtcacttttttgctcatgtttttcctccttgtgctgtcgatatcatatcagccgttcctctgcataaaaaccctgcttcaaaagagcaggggcattgagaaaacgatggacatgtcgaggcaaaattgcctgttcaatacaaaagagcgggtttccccactctttgcctcggtaatcgttagcatttccaataaaactataccataaccatatatttaatgcaaatcaaactccgctcggaggctgtgcacaaagcttaaaacagagacagctgattttggtccggaagcgactcaagacagccgtgacggtctaaatactctaaaatggtttttgacacttttcctcgtttttgaagatcctcttttgaaaggaactccccttctttccgcgctttcacaatattgagagcggcgttggttccgagtcccggaattgagttgaacggcgggatgagactgttgccgtcaatgataaattccgaagcgctcgaacggtatagatcgaccttctggaaggaatagccgcgctcacacatttcaagcgcaagctctaacacggtaaggaggtttttctccttcggcgaagcatcaagccctttagagctgatatcatccatcaccgctctgatggcggtcgagcctttaatcattgtatcaatgtcaaagtcatctgcgcggacggtaaaatacgcagcataatataaaagcgcgtgatgtactttaaaataggcaatccgcaccgccatcagcacgtatgcggcggcgtgggctttcgggaacatgtatttgatttttttacatgaatcaatataccagttcggcacattgttctttttcatttcttcttcccattccggcgtcaggcctttgcctttacggacgaattccatgattttaaaagccagtgaaggctcaaggccctgatagatcaagtaaaccataatgtcatcacggcagccgatcacttcgctcagttcacacgtattgttgtgtatcagttcctgcgcattgccgagccatacgtccgttccgtgagaaagcccggaaatctggacaagctcggagaacgtagtcggcttcgtatcctcaagcatctgccgcacaaatcgcgtcccgaattcaggaatgccgagcgtccccgttttacagccgatctgctcttcagtaacgccgagcgattctgtaccttggaaaatcttcataacttccggatcatctgtcggaatcgtcttcggatcaattccgcttaaatcctggagcatccggatgacggtcggatcatcgtgccctaatatatcaagcttcagcaggttgtcatgaatggagtggaagtcaaaatgagtcgttttccattcagaccccgtcgcatctgccgggaattgtatcggtgaaaaatcgtaaatatccatgtaatccgggacaacgataatcccccccgggtgctggccggtcgttctcttaaccccggtgcagccttgcaccagacggtcgatctccgcgccgcgcatgtgcaggttgtggtcgcccgcatagcctttcacatatccgtaagccgtcttttccgcgacggtgccgatcgttccagcgcgatacacgttatcttcaccgaacaatactttcgtgtagttatgggcatgcggctgatactcacctgagaagttcaagtcgatatcgggtactttgtcacctttaaagcctaagaacgtttcaaacgggatatcatgcccgtcctttttcaaaggtgtgccgcaagacgggcagcttttatccggcaggtcaaaaccggaaccgactgatccgtcattaaagaattcggaatatcggcagctcgggcacacgtagtgcggagcgagcgggttcacttcagtgatttccgttaaggtcgccacaagcgatgaaccgacggacccccgggagccgacgagataaccgtcatccagagaccgttttacaagcttatgagagatgagataaataacggcgaacccatgaccgatgatactttttaattctttttctattctcgcttctacaatttcgggaagctcttcaccgtaaatgcttctggcgcgctgatagctcatttcacggatttcttcatcagccccgtcaattttcggcgtgtacagatcgtctttgatcggtttgatctcatcgatcatcgaagcgactttctgcgtattgtcaaccacgatttctttcgctttttccgcaccgaggaaggagaaagcctccagcatttcatctgtcgttctgaagtgcactttaggcagttcgtgtctgtttaacgggttggcgccgccttgggaagatattaagatcttccggtaaattttatcctcatcgtttaaatagtggacatttcccgtagccacgaccggcttattcaatttttctccgagcttcgtaatgttggcgatgatttctttcagcgctttttcatcccggacgagctcaagctgcagaaggtgtctgtatacttccggcggctgcacttcaagataatcatagaaggatgcgatatcttcaacctcttcaggagatttttgcatcatgccttcaaagacctcacccctgtcacaggcagagccgattaacagaccttctctgtatttattaagctgcgacctcggaatgcgcggcactcggtagaaatattgaatatgagaaatggacacgagcttaaacagatttttaaggccggtctcatttacggcaagcaatgtagcgtgataaggtcttgatctctgataagcattggattgtcccatattctcattcagctgatcatgataaaaaatgtctttttcagcggcatctttgagcattttcaacagcaggtagcccgttgcttcagcgtcaaaaaccgctcggtgatgctgggttaattcgatatcaaacttcttacataacgtatttaagcggtgatttttaaactcaggatacaggaaacgcgcgagttccagcgtatcaatgaccggatttttcgctttttccgttttcaaaagacgcttgtacgccacatttaaaaatcccatatcaaagctggcgttatgagccacaagcacgtcatcgccgatccattctttaaaatcccggacgacgtcaacgacatcgggagcgtcgcggaccatgtcgtccgtaatcccggtaagctctatcgtcgttgctgacagcggatggtgcggattggcgaacgcttcgaatttatcgataatttctccgcctcttattttgactgcggcaagctcaatgatggtgtcatacactgcggacagacctgtcgtttcaacgtcaaagacaacgtatgtgtcttcttccaggagacggtgagatggattgtatgcgatcggaacgccgtcatctacgatattggcttccattccgtaaatcattttaatgccgtgttttttcgcggcggaataggcatccgggaaagactgcacaacggcatgatcagttaacgcaatcgcttcatgtccccattttttcgcctgttcgacaagctttccgacgcccgttacagcatccatttggctcatcggagaatgcagatgaagctcaacccgtttttcgccttcaggagcggtgtcttcacgggttttggcttttatttcattcacgtcatttgcaatcatgacgaggtctctgacgaatgtatcgttttgaatgcttccccgcgccttcacccacatgccttttttcagcgttttcatcaaagcggcgtcttctttttctctggcgaacatttttactaaaatgctgtttgtatagtccgtgattttgaaaatgcagagcgtgcgtccgcttttcagctcgcgtgtttcagcatcaaacacaaacccctgcaccgtaattcttctttcttcatccatgatgctgtcaagcgtccggatttcttcgttctctttaatttgatagccgatgacaagcggtccggacggtgcctgatcctcatcgccctctttttccttcttctccatctcgataagcgcctgcatcgcccgctcctgatcttcagcaagcttttgctcgcggaatttctggacttcttggtcagatacgaaaatttcggtatccagctgcagttccggaaagccgaattggcggtagctgtgctgaatcagcgcgaagtatttatttttgagcgcagatgcttctgtatctgtttttgttttcacgatcagtttgtttcccttgagcttcggcttctgctgattcaaaagagccaccatcggcggcgaggttccttcaagctcttcaatacagcgtgtccaataatcctgtacaagctcctctgtcactgtagggtcgatgacctgaacagacgatgtgacacgggcgatgtgagcaaacgattgtgttaacctcatcatgaatgaatcatatatttgatacggcaaaagagccttaaagcgaaattggaaatgccaggccttttctgctttatggattgtcagtttatcaatctctccgtcttcaaagtatgtcatgaaggtatcatctgtcatattaagctggtgcagaagaatctgaaactgtcttctgtttactgataactgttccattcagacagtatccctcccttaaaacatcataagtgaaggtacctccgcaggtgatgaggtaccttcttttttctctattttaacatgattttgtatgattcgttatggtgattacttcgtcttgataaattcagaaagctcatccactgaaacttcggcagattcaccggttttgcggattttcacttctacgatgccttcgtcggcacgttttccgacagtgatgcggatcggaaggccgatcagatcagaatcagcaaacttcacgcctgcgcgttcagcacggtcatcgtataatacctcataaccttccgcctggaatttgccgtaaagctgttcagcaagctctttttgcgcttcgtttttcatattcagcgccaaaatatgaagatcatacggagcaacgcttttcggccagatcaagcctttttcgtcgtgatgctgttcagcgatggctgaaagcgttctggacacgccgattccgtaacatcccatcagcatcggctgcgcacgcccgttttcatcaaggtatgtcgcattcatcgcttcagagtaacgcgtgccgagtttaaagacttgtccgacctcaatcccttcagcgaaacggatcgtgccttttccgtcaggtgacggatcgccttcctgaatgattcgaagatcggcatatgcttttactgacgcgtcacgttcgatgtttacgtttcggtaatgacggtctttttcattcgcgccgctaacggcgtttaccattactttcacggcttggtcggcataaatctcaatgtcgccggaagcgccgatcggccccgcaaatcccggctccgtgccaagtttctcggctacttcttcatgagacgcaagctcaaccacttccgcgttcagaaggtttttcactttcacgtcattgacctcatgatcgcctcttactaacacgagaacaaatcggtcatcagctttaaacagcattgatttgatgcaggcgctcggctcgatctgcaagaacgaagcgagctcttcaatgcttttgacattcggtgtatcaattttctccaatgcctcgggtgtttcatctgacggctcgctgttcatgacaacttccgccatttccgtattggctgcgtaagaggatccatcggaataagcgatggtatcttcccctatttcagaaagagccataaattcatgcgtgtcttttccgcccatcgcgcccgagtcggcaataacgggacggacgtttaattcacagcgtgcgaaaatgctgctgtatgcgccgtacatgttttggtatgtttcctccagactttcttcagaagcatggaaagaatacgcatctttcatgatgaattcgcgtccgcgcaataagccgaaacgcgggcgtttttcatctctgaatttagactggatctggtaaagagtgagcggcagacgcttataagatttcacctcatcgcgcacgagagaagtaatgacttcttcatgcgtcgcgcctaaagcaaattcacggccgtggcggtctttcagacgcattaattcaggcccgtacgtataccacctgcctgattcctgccatgtttcagcctgctgaagggccggcatcagcatttccaccgcgttgattttttccatttcttcacgcacgatcttctgaatgttttgaatgaccctgtaagccaggggcatgtagctgtaaaccccgctcgtattttgtctgataaatcccgctctcagcagaagcttatggctttttgcttcagcatcagccggcacttctctcagggtcggaataagcgtcaaactttgtctcatgtcttcgcacctctgattttttactagtcaattataagaataaacgctggatatcgttccatgtgacaaccagcataagaagcattaagaaagctacgccgataaatacaacaaatgcttccttgtcacggtttatcggcttgccgcggattgcttcaatgaataaaaacagcagccgcccgccgtcaagcgccggtatcggcagcaggttgacgattcccaggttgatgcttaaaaacgccgcaaactggaataggttgataataccggtttttgcaacttgatccgtcatatcataaatgccgacaggacccgaaagcatatcaagcttaaactggcctgtcacaagtttgctcagattggtcaggatcgcttttgtgacatcaacggtagatgtcgcgccgtaggcaatcgctgcaagcgcgcctttttcagtcggcgcataagagccgaagcggccgattgtttttttattttcatcttttacagcttcaggtgtaaccgagatatgaaacgatttgccgtcccgtttgacggcgacatcgattttttttccgggattttcttttaccgctgtcacgatgtcggtccatgacctcattttttcaccgttaatgctctggatatagtcgccttcttttaaaccggcagccgctgcgcgtccattgtctgtcagcttcccgagctcaggctgattcgaaggcacgccttgaatgaatccaagcatgacgagaatgacatacgctaagatgaagttcattatcggaccggcagcaatcgccttaatccgcttccatacgggtttagacccgaattgtcgattgtaaggcgcaatctgcacttcttctccgtctacgataaaaaaagaggtctgactgacagtaaagcccgccagttcatcttctttcccctgctcgtacccggtaatcttcatttcgtgctcaagatcagccgtctccacctcgataattaaagcgtcgggatatttttccttttgattaatgatgactttttccacttcgtcatctttattaaaaagaagcccgacggtataaccgggtttgacttcgatcatctccgggtcttcaccggccatgcggacgaacccgccgaccggaaggagtctgatcgtatacacggtttcattctttttaaatgaaaagattttagggccgaagccgatcgcaaattcacggcaaaggattcccgctctttgggcgagcaataaatgcccgagctcatggaaaaaaacgagcgttccgaaaataataataaacgcgataactgtattcacgaacataccaccttatgtgagtattgaattaacgtatccccgggtgtctttgtccacttcttggatatccgcaagactcggatcctgaattacgctgtggcggtccaatgctttttcaatcaggtcctcaatcgataagaatgaaatccgtccggcaagaaaagcggcaacggcttcttcgttggccgcatttaaaaccgtcggcatcgttccccctattttacctgattcaaaggcaaattgtaagcagcggaacctttcaaagtcagctttcgcaaaatggaggcttccgatctcccataattcaagcctttttgtttcaggcagaggcagccggtccggatatgtcagcgcatattgaatcggcaccctcatgtccggatttccgagctgggcgatgacgcttctgtcgtgaaattcaaccatcgaatgaatgatgctctccttatgtaatacaacgtcaatctgttcatacggaatgtcaaacagccaatgcgcctcaatgacttcaagtcctttattcatcattgtagccgagtcaatcgtaatttttgcgcccatcgaccagttcgggtggttaagggcgtcggcaatcgttacagactcaagctcctgccgcgttttatctctgaaactgccgccggatgccgtaatgaccaggcgctcgatatttttgctctgttcgccttgcagggcttgaaaaatagcggaatgttcgctgtcgaccggaagaagaggaacaccgtatcgttttgcgtgtcctttcactatatgcccggcagtgacgagagtttccttatttgcaagcgcaattgtttttttctgttcaatcgctttcaaagtcgggattaaaccgacgcttccaagcagcgcattgaccacgatatccacttcgtccatgactgccgcttcaatcaggccttcttctccgatgccgatttgacattcatgagaaaaagacgcttctttcactttttggtatgtatccatgtcgccgactgctacatatttcggctgaaacgttctgatcaacgggatcgctttctcggcgtttttaccgaaagtcatcgagacgagacggaactgatcttgatgcatgcgcaatacgtctaacgtctgctcccctattgatcctgttgctcctaaaagacaaatattcttcaaaatgccactcccattctatgcgtccagattggtcttattttcatattagcctttctcatgaaaaaagcgcaagcagaaagtataagaacggcatgacaaacaaaaagctgtcaaatcgatctaaaatgccgccgtgcccgggaaggatttttcccgaatccttcacatcatagtgccgcttaagcgctgattcaaccaaatccccgatctgtccgaatacagacagaacaagcgtgatgaccaaaagaaccgggtatgaaatcggaaggtgcgcaaacagctgaaaaacagccgtaaaaataagggcgatgacaataccgccgagaaacccttccaccgttttgttgggactgatttcgggccacagcttccgcttcccgagcgactttccgacgaaatatgcgcctgagtccgttgaccatatgacaacgcaggcataaaagatatacaaaagcccgtttgtttcaatgtttctgatttcaataaaataatgaaaacacagtccgatatataccgtcgcgagaacgataaacccgacttcgtcaaacgtaaaggtgtttttcacgagcaccgtatagctgagcagaatcaatacagcgaaaatcgttacttccattttcgcatcgaaaaaatgatacttgtccggcatcatatacagccataacaacaagaggctgatcagacccggaaaagaaaaaaatctgagctttttcatccgcaaaagctcaaaaagcgctatacttcccatcacgtaaacaaatacggtgaacggcaatcctccgaaaataaccaaaaataaaaataatgccgctgccagaacacctgttaacaatctttgtttcatttccaccatcctctaaattccgccaaacctccggccccgctgctgaaattctcccactgcctgcagaaagtgatcttctttaaaatcgggccacaggacatctgtaaaaacaaattcactgtaagccacctgccaaagcataaagttgctcaatctgatttctccgctcgttctgatgagcagctccgggtcctggattgattctgtcattaaatgcccggaaaagagcgcttcatcaatgtcatcgatattcagcgtgccgcttttcacctgttcagccagtgcttttgccgcattgacgatttccgtgcgtccgccgtagttcaaagcgaaattgagaatcagcccgtcattttgttctgtatcttttacggccttctcaatcgccctgtacgtatgagaagggagcgcggattcatctccgataattttcacctgtacattttcctctattaattcaggaagatacgtattcaggaactcttccggaagcttcatcaaaaagtcgacttccatcttcgggcgcttccagttctccgttgaaaacgcataaagagtcagaactttaacgccgagctgacttgcgagctttgtcaccctttttaccactttcattccttcatgatgtcctgcaatccgagggagtgaacgcttcttcgcccagcgtccgtttccgtccataataatggcaatgtgtgcgggaatttcacccttcagtatgtcttcttttgtataccgttctaagttggaagccgcattctgctgattcttccaatttttgagtatgttgagcatgagattcctccgtcacccaaaaaggttgcgttgctgatgatcaatgtaatcaacagtattaacaaaaaaaccccctgtaaacatgagagggtcttttcacattatctattgtacatagtttttcattaaacttccatgatttctttttctttgtcctttgtgacgctgtcaatttttgacacatattcatctgtcagcttttgaacgtcttcactggaagcacgaagctcgtcttctgtgatgtctccgtttttctcaagttttttgaggtcatcgttgctgtcacggcggacattacggactgctactttcgcttcttccgcgtattttttcacgactttgacaagttctttacgtctttcttccgtcagagccgggatcgcgatgcggataattgtgccgtcacttgtcggcgttacgccaagatcagctttcagaatcgctttttcaatatcgccgattgccgttttgtcatacggtgtgacaacaagcatacgcgcttcaggcacattgatggaagacagctggtttaaaggtgtttgggcaccgtagtattctactgtcactttatccaatagagatgggttggcacgtcctgcgcggactgacgccaattcacgtgaataagcggcaaccgctttttccatgcgttcttttgtttgtgttaatacttcgtttgacaacgttatttcccccttacgatcgttccgattgattcgccgattacggcacgcttaatatttccttcttccataatagaaaagacgatcagcggaatatcattatccatacatagtgaagaagccgtagaatccatgacttccagcccgtcttttaacacatcgagataagataatttttcgtatttaacggctgactcatcttttctcggatcagcattatacacaccgtcgacattattttttgccattaagatcacgtccgcttcgatttcagcggcacgcagcgctgcggttgtgtccgtagagaaataagggtttcctgttcccgcggcaaaaataacaacgcgttttttctccaggtggcggatggcttttcttctgatgtaaggctcagcgacctgacgcatttcaattgatgtctgcactctggactgaattccgagcgtttccaggctgtcctgcagggcaagtgagttcatgacagtagcaagcatgcccatataatcggccgtcgcacggtccattcctaagtcactgcccgtttttccgcgccataagttgccgccgcctacgactacggccacttcgacgtcaagctcagcgatttcttttacctgtttagcgatggattggatgacagtcggattaatgccgtttccctgctctcctgccaatgcttctccgctaagctttaaaacgatacgattgtattttggtttttccataataacctccaagtgtaaacattgccgtttcctattatgcaagagaaaaaaaggtttgtaaatatagttttaaaaatagggaacacaagtagtgtcccctatactgcctgaaaagccgcgaaagattcgccaaggctttccgccattattttttcacttggttcataacttcttcagcaaagttttcttggcgtttttcaataccttctccaacttcgtagcggacgtaagttttaacagatgcgtttttcgcagccacaacttgtttcactttttcgtctgggtttttaacgaaagcttggtctaataagcaaatttcttcgaagaatttgttcagacggccttcaaccattttagctacgatgttttccggtttgccttcttgaagagcttgctgagtcagaatctgacgctcatggtttgcttcttcttcagacacttggtcgcgggaaatgtaacgaggatttaccgctgcaacatgcatcgcgatgtcttttgcaagatcttcgtcagttgttccgctaagaacggataatacgccgatgcggcctcccatgtgaaggtaagcaccgaacgcttcgctgtcttcttttgaaataacagcaaaacggcgaagagtgattttctctccgattttagcaacgttgcttgtgatgtattcttcaacagtagaaccgttttccatcttttgacccattgcttcttcaagatcagcaggagcgtttgcaagaaggtggtcagcaagcgtgttcagaagctctttgaagccttcgtttttcgcaacgaaatcagtttcagagtttacttctaagataacgcctttgttgccgtcagttttaataagagtagaaccttcagcagcgatacggtcagcttttttagccgctttcgcaattcctttttctctcagaaggtcgattgctttgtccatatctccgtcagtttcagtcaatgcttttttacagtccatcataccagcgcctgttttttgacgcagttcttttacctgctgtgcagtaatagccatttgaattcctccttatatgtgtaaacaagatatgtatagatacatttttcttgaaaaaaggtgataaaaggcagtccctcttatcaccttttgattaggttacgcagttgtcgtttctgtttcaggtgcagtctcttcagcagcttccgcttcttcttcgccttgcttcgcttcaagaatagcatctgccattttagaagtaagaagtttgacagcgcggattgcgtcatcgtttgcagggattacgacatcaatttcatcaggatcacagtttgtatctacgattccgatgataggaatgttcaatttgcgagcttccgcaacagcgatgcgctctttgcgaggatcgatgatgaataatgcatcaggaagatccttcatgtctttaattccgccgaggaatttttcaagacgctctaattcttttttcaattgaacaacttcttttttcggaagtacttcaaatgtaccgttttcttgcattttctcgatgtctttcagacgcttaatgcgtttttggattgtttcgaagtttgtcagtgtaccgcccaaccagcgttggttgacatagtacatgccagagcgtacagcttcttctttaacagaatcctgagcttgtttttttgtgccgacgaaaaggatttttccgccttcagcagcaaggtttttcgtgaagttgtaagcttcctctacttttttcactgttttttgaaggtcaatgatgtagattccgttacgctccgtgaaaatgtaacgcttcatttttgggttccagcggcgtgtttggtggccgaagtgaacaccagcttcaagcaattgcttcatagaaataactgacatgtgatttcctcctaataaaatggtttttttcctccgcttaggtcatttttgtgcagaactgccgtttgcagcaccctctgcataaatcgttaagcgtgtgtatttaacaccaagacataatataacacagctttatgcgacaatcaagaatcctttacagctttgccgcgaaattttaaaaacagctcgatttctgtctttccgctctgcatccgtttggcgatttccgcgggggtgagcccttgttcatataattctgaaacacgttcttcaaacgaatgcgcaccgttgttttcgtcactttcagcccgttccgttgcactgataagcttttccatgtggtccggaatatcaggctcttctttcggttccgccaggggttcggcgtcttctgcgtccggcgcttgacggctttttgcgtcttcgagtctttcattttcttctttcagctcaagcagaaacgctgcaagggtgttttccgtctcttcaagaatcttcttctgctggcgctccgtctccttgagggctgaaaacctcgtgtacagaataatgacggcataaagcagtacgccgtgaagcacaaagcttaaaagccataatagtgttgacatgtttttcactcgctaaccatgagttcattattgaattactttttcaagcagatgctttaatttaaacagcgcctttgaatgaatctgtgaaatccgcgacgtcgaaaggttcaggacttgtccgatctcggtcaaagtcagttcttctttatagaataaactgacgacaagctgctctttttcagagagctcgtgaattttgcccgcaagctgagcgatcagctcgtccttcatgattttttcttccggcggcacatttttgtcatctctgatcatcacttgaatattctcaccgtcatcctggtcgtgaagcttttcatcaattgataagagattggcaaaaaaaccttcattcatcgttgatactacgtcctgctccgtcatccccagctcttctgcgatctctgaaggcgtcacattccgaaggtagcgctgttcaagtttttcgatcgccgcttcgactttttttgtcttctcccgtgaagttctgggcagccaatcttctttacgcagcccgtcgatgattgcaccgcgaattctaaacgaggcataggtatcaaattttaaatcccggccggggtcaaatttttccagggcatcatataaaccaagcataccaaggctcattagatcgtctttatgcaccgatttcggcagtccgacggaaattctgccgacatgatatgtgaccagcggcatgtaacggcgcattaaatcatcaccggctttaggatctttccactctttccagcgcgaccaaagcacctgatcttcataattcaaggattgcattgttatccccctacctcatacctttattaaatcgttgtttcaccttgtttaacagttcgaatgtgcagcatgcaggaccttggctcaaattcaatcgtccggccgcttgagccgcccgtatcttcactgatgaccggaatgttatacaatgaaagctgctctttgatggccgctacattcctcggaccgattttcatcaggtcgttcgtcattttaaacttaaacatctccgctcccccggcgagttttgccttcagggcaaacttgcggcagccggctttcaaaagcatatcaatcgtcatcttaacggcggtgtccgcgtattttgcacggttgagctccgccgtttttgataaaccggagtccggcagcatgacgtgaacgagtcctgccgtttgtttgtctttatcgtataaaaccagccctacgcatgaaccgagtcccgaggtccggattttatccgggtaacgcgcgacttgaacatccgcaatccccactttaacgactgcggcttccgcacggctcataaagccgcacccaatgagacgaagagcttttcaaaagaatcatagtccgggagcataaacatgtgggctttgagctcctgccggctgccctggtcaaaaatagaagtatccacgacaatggcatgctctccgacttggctgagttccatcagcccttcactgataaccgcgccgaacatatcaagtgagatttccggcacgctcgggtaaatctcaagctttgtcaaatcagccaatgccgttaaataggaacctgctaaaatattgccgaactcatgtaaagcagaagaactcaaatgatcttcacccaactggtcaatatcaaaatccggatttccgatcagctctctgataaactgttccgcctgatggaaaggcatgatgagaaagatagagccggtcatgtcgccttccattcttaaaaagatactggcgaccggcgtttcagccccgccgaaaaaatcagcgagctcatcaaatgtcaataaagtcgcaaacggcacttccatgtctatctttctgttcagcagctgagccattgcagaagccgagtgacccgccccgatatttccgacttcccgcaaaatatccatctgctcttctttgatcgcttcaaacttactcatgttgtcttttcccctttaagcattaggctctccggacgcagatgccgaagcacctttatccagcaccgcatgcgcatcgataatattgaggagcctgttatcttgcttgacgatctgtttaatccacacatccgtttcctttgtctggctttcaggcgcggattcgatttcattttcatgcacggtgatgacgtcattggcctcatccacgacccatccgacatcagcgtcacggtaagaaatgatgataatccgagtctcttctgtgatgtcctgttcaggctgattcagacgttttcttaaatcaagaaccggggtaatcactccgcgcagattgataacgccgcggatataagattccacacccgggaccctcgtcggtttttgccacttttcaattgatttcacctgggaaactgagatagcgtattctttcccgtttatcataaacacaatcattttttcacctgttttgatttcagcagtcattcgggcacctcctcgtgtcgttttagtagatcagcgcattgcaatcaataatcagcgccacttctccgtttccgagaatcgtagcgccggaaatcgcaaagacgttcgtcaaatagtcgccgagtgatttcagtacgacttcctgctgtccgataaaagaatccacgacaaaagcagtggatttatcgccctttttcacgacgattacatggaactgatcggcatcctgttttgaatccgtaattccgaattcttttttcagatagacgatcggaacgatttggcctctgaaatcaatcacttctctgtcatgcgtctgcaggatatctttcttatcaataacagccgtctctataatagaagaaatcggtatcgcaaacgtctcttcttccagtttaatgagaagaacggatataattgaaagtgtcagcggaagctggatactgaaaagagaaccttggccttccgcggatttgacactgacagagccgccgagtgattcgagtttattttttacgacatccaggccgacgccccgccctgaaatgtcagaaatttgatcggcagtcgagaagcccggagcaaaaataagctcgtaaatctcattatcttcaagcgtttcagcatcacgttcggtgattacactccgctcgagcgctttttcaagaattttctttctgttcaggccggccccgtcatcttcaacctcaataaagacgtggttgccgctgtgatatgccttaagcacgacatgacctgattccggttttcctttattcacccgcacttcaggcgattcaatgccgtgatcgatgctgtttctgattaaatgaacaagcggatcgccgatttcatcaatcaccgtgcggtccagctccgtttcagctccgatgatggacaattcgattttcttgtttaattctttttgaagctggcggatcattctcgggaaacggttaaagacggtttctaccggcaccatccgcatattaagaataatagactgaaggtcgcccgagattctggtcaggcgttcaacggtttcagtcagctcattgtggtcaagctccttggcgatctgctcaagacgtccgcggtcaatgacaagttcttcaaaaaggttcattgaagaatccagtctttcaatgttgacgcgaatcgttttcgagccgctgtgatgcttcggctgttcttccgttttcgcttgcggcttaggctgtttctcagcctttttaaccggagcttccttcaccggttcagccgcttgcggtttttcggccgtttttaacggcgcaccggcagaaatttcgacattctccacttctgaaatgccgctgatgagttctttaatttcttcagcaggctgctttgtcaagaaacacacctgaaaatccgttccgaaatcttccgtctcaagcacttccgcggcgggtatcgtttttgcgacttccccggcttcattcagcttttcaaatatcatgtacacgcgcacggctttgagcatgcagctttcattcagggaaaccgttatttcatagcggctgaatccttgctcttccgcctcttcaataacagtccgttcgaactcgtcataattccattcagttgaagcctgttgttttgaagccggcggttctgctgtttcggctgaagccgcagtctcatgcaccgcatttacgtcgagcttcgcactcacttcagaaatatcacgtttgccgtctcctccgtcaataatggactgcaccatctcttcaagatgatcaagcgcttcaaacagcacatccagccaatctgatgtaacgggcatttctccgttgcggatggcgtccagcacattttccatcaggtgggttaaatgcgccagatctgtatatcccatcgttgcgctcatgcctttcagcgtatgggcagctctgaagatgtcatgcacaagctgaaggtctgccggatctttttccaacagcagcagcttttcgttacatgtctgtaagtgctctttactttcatcaataaagacatctaaatattgattcatatccaattgattcacaccctctcttttttcacacatccggtgatggatgccgcgatatcttccacatgtttaatctcatgaatgaggcccgcctttatcgctgacttcggcattccgaacacaacacaggattcgtccgattccgcaatcgttttaacgctgcctgttctgagcatttcttttacgccctcggttccgtcgctgcccatgcctgtcataatgacggctaccttttcgtaatcggataagcggcttgccgaccgaaacaaataatcggctgacggtttatgccggctttccgtatcatgaacgtcaagaatgatgcggagccttccgccttcctctgcaaccgtcatattttttccgccgggcgcgatgtacacccatccgtccttcgcttcttcaccgttttccgcttctttgacctgaatatctgacaaatggttgagtctgtctgcaagtgaagcggtgaagccttcaggcatgtgctgaacgacaaatacaggcgcctttaaatccttcggcagtttcggaatcaccttttgcagagcccgcggtccgcctgtagaggtcgcgatgaatacggcctgcttggcggattttgctttcggtctttcaaatcccgccaaagccggacgttccgggatagaagactctttcactgccgcctcaggtttttgtgcgcgggacagcccggctgcaatcaccctctcaatcagctgctctttaattttataaagatcaagtgaaatcgctccggaaggcttggtaataaaatcaaaagcgcccatttccaggcagttgatcgttcggtccttcccttgctgtgtctggctcgataccatgatgacgggaagtttatatatgctgatgatcttccgcaatgtatccgttccgttcatgaccggcatttcaatatcaagcgtgacaacatcaggcttgagaagctctattttcttcagcgcctcttccccgtttctggctgtcccgatgacttctatctgcacttccgcagccagaaaatcggtaatcatctttctcataaaagctgagtcatcaacgacaagcacacgaatcactgtaaagtcctcctcaataaaaaagaagataatctctcaataaatgccggtttctcttctcttggtttgttttcttccgtttgaaacaagacatccgtcagaagacggacggacctgctggcttttgcttgaggattttttattaaaaaaggcacctggtcaatgacggcttgacttactagcgggtcatcgggtatggagccggcgaaacgcacctccgcgcctaaaaacatgtgaatcgcatgagaaaggcggttgtacgtgtccagcgcctgtttttgggcgcgggcgcgattgacggcaatgtttacggtcagccgttcatccgcgagcaaaagatgtttgatcgcgctgtaggcatccataatggccgtcggctcaggcgttgtcacggcgagaatgtcttccgccgataaaataaacggcagctgctcttttgaaagtcccgctcccatatcaaacagaacgtaatcaaaatcgcttaatacagcggaaagaccattcataaaagccgaccacttctctctgtctgcttgatagatcgcctcaagccccgttcctccggatatgtagcgaaggcctttcggaccggaggacagtgattgagccaatgcgtgccgattctccatcacatcaataatggtgcgggaagaagcagcgccgatcagcacatcaatgttgcccattccgatgtcaagatcaatgatgagtgctttttttcctttttcctgcagggcaactgccatgtttaatgttaaattagattttccgacgccgcctttaccgctgatgacggctaatgtcttcgcttttttctcataaagctccggcttgatcatttgccgctctctcattttccttcttaatgactctgcctgatcgggtttcatgtcaaaagcatccttacaaactcttttggtgaagccgataggatgtcttcaggcacatcctgtccatttgtcaaataggcggcgccgattcttgattccgacagcacttgaaacacggagccgagtgaggcggtttcatccgttttcgtgaaaatgaattgattgaccggcacacctgaaaactgtttcagcacctgtttcatatcttcatattttgcagatgcggataatacgagaaaggattgtaagcctgattcaaacggaatcatctcttgtaattccgtaatatactgctcttctttaaagtttctaccggctgtatcaatgaaaacatggtcatattcagcgaatttttccagtgccttcagacattcttcctttgaatagcatacttcaagaggagcctgaagcagctccgcatatgtcttcagctgctcgaccgcggcaatccggtaagtatccgtcgtcataaaggcaatttttttatgctctgtcagcattgatgaggccgcgagtttcgcaagtgtagtcgttttgccggccccggttgaaccgaaaagcacgacgtattttgattgaatcccttcctgccacctgtctgccgaagggagctttttcactaacaaatcctgcagttttgagctgacattatcttcagttaaatctccggaaacaattgaagaacggagcaattcactgagtacggcgttttgcgtatgatcaggaagcccggcttgcttcaatagtctctcggctttttttaatggttcagggagcacttctttaaaatgcgccagttcgccggaaatactttgatccggaagacgcggcggctgaacaggctcagctttctccgccgttttcgtctttttcaattcttcagcggcagccggcggcgtttttctcgcttccctgacgtcacgatctaaaaccgctatcacttcgacggcctgctgcgaccgcagccccagccattttcgtttctttacttgtttggaatgtaaaataacggcatcattgccgagttcctttttgatttgcttcgcggcatcctgcattgaagcggctgtaaatttttttattttcattaaatatccaccactccaatgctctgtacttcaacatttgcttccagctcattataagaaagaaccggaagatcagggaaataccgttctaacagctgttttacatacattctgacagcaggcgagcaaagcagaatcgccgactcctggcggatggaaagctgctcggcctctttagcgacagaacggatgatgctgtctgaaacctcagggtcgagtgacaggtaattgccctgttcagtctgctgtaccccgtctgcaatcgctttttccacccggcctgagcatgtgatgaccttcagcgtttcatgctctctcgcatattgtgccgtgatttgtttggcaagcgactgtctcgcgtattctgtcaaaaggtctgaatctgtcgttaatcttccgtaatcggcaagagtttcaaaaatggtcaccaagtttctgattgaaactttttctctcagcaatttggcaagcaccttttgaatatcgccgacagaaagagggtttggcgtgacttcctcaacaagcacaggataattttccttcagatgatcgatcagctgctttgtttcctgtctgccgaccagttcatgggcatgctgcttaattttttctgtaatatgcgtagatacgactgacgccggatcaacaactgtatatcccagcatgtccgcttcatcttttgcagcttcactgatccattttgcgggaagtccgaacgacggctctatcgtttcaattccttcaatgacgtcatcttcaggcgtcggtgacatcgctaagtaatgatccagcaggagctctcctttagcgacttcattgcctttaattttcaatctgtattcattcggctggagcgcgatgttatctctgatgcgcacaaccggaatgacaagtcccaattcaagcgcaagctgacgtctgatcatgacgatgcggtcaagaagatcaccgccctgccccgcgtctgcaagcggcacgagtccgtatccgaactcaaattcaatcggatcaatatgtaaaagctgcacaacgctttccgggcttttcagttcatccgcctgagcctcttcttcaagaatttcttcctcttcttcgctcggcttatccgctttggacagcatgtaagcgccgaatgcaagcagaccggcgatcggccccgtcagcagaatgccgatcggtgtaagaagaccgagcaaaagtacagttcccgcagctacatacaagagcttcggataagcaaacagctggcctgtaatatcatgaccgaggtttccttcagatgccgctctcgtcacgacgatccccgtagccgttgaaatgagcaaggccggcatttgagaaacgataccgtcaccgaccgtcagcattgtaaagtgagacgcagcttcttgtatgctcatcccctgctgcagcattccgattacgattccgaaaataatattgatcatcacgatgatgatacccgcgatggcatcccctttgacgaatttgctcgcaccgtccatggcgccgtaaaaatccgcttcccgggcgactttttcacgtctgtgctttgcatcctgctccgtaatcatgccggcatttaaatccgcgtcaatactcatttgctttccgggcatcgcatcgagcgtaaatctcgccgccacttccgatacccgctcggcgccttttgtaatgacgataaactgaataataatcaagataatgaagacaacaagccctaccagcacatttccgccgacaacgaaattcccgaatgtctcaacaacctttcccccttctccgtgagaaagaatcgaacgtgtcgtcgacacattgagcgaaagccgaaacagcgtcaataacagcagcaatgacgggaatatcgagaattgcagcggttcttgcatattcattgtggtgagaagcacgatcaacgcaagagagatattaatgatgatcaaaatacttaacaaccatggagggaatggaatcaccagcattgccacaatgaggacaacacttattaaaaccgataaatctcttgttgacatgctgtttttctctccttttgaatctgaaattcactatactttttgtttcgttttatatacataagccaaaatttccgcaatgactttgaaaaactcttccggcacggcctggtcaatgtcaacctgatcatataacgcacgcgcgagcggcctgttttcaatcgtcatgacatcgtgttctttggcgatctgtctgatttttaatgcgagatggtcgaccccttttgcaacaatgtaaggggcgtccattttcttttcatcatattttaaagctatcgcataatgggtcgggttggtaatgatgacatccgctttcggcacttcctgcatcatccgcctcatcgccatttcccgctgcttctgcttaatcttggacttgataatcggatcaccctccgattttttgtattcatcttttatatcctgttttgacattctgatatttttctcataatcaaaacgctgatataagtaatcaagcccggccagcagcattaaagcccctgatcccgcaagccccatccaaagcgtgagcttagaaacgaaagtgagcacttccgcaggcgttaaaagcggaaggcggagaatatcgccataatgcagccagagcaccataaaggcggcaaaaccgaccacagtaatcttcaaaatggatttgaccagttcaacaatcgccctcatgctgtaaatccgcttaaatcctttcagcgggctgagcttattcaagtcaggcttgaggacttccgcagaaaacagaaaacccacctgcatgtaattgctcacgacacctgccacaagcgcgaccagcataatcggcgcgaggatgaggctgatatctttcaccgtatccacgaacagttcatgcacggcagatgcagacagatgtaatgatatcgatttcgtataaaacgttttaataaaggacagcagcctgtcccgcatataaggaccgagcgcgatcagcgaaagaaagataatcagtaaagaaacggctgtattcacatccgtacttttcgcgacctgtcctttctttcttgtatccttccgttttttcggcgtggctttctccgttttttcaccggcaaagaattgcagattcagtctgagtctcatcatgtcacaccgaccaatgccaatagattccgcatggtttcaacggtaaggctgaagatgttgcggacgacgacaaacatcaccgacatacaaacgatcagcataataaagctcacggctattttcagaggaagcccgacaacgaaaacattcagctgcggcaccgttctcgccacaatgccgagcgccaaatcaactaaaaacagactggccacaaccggcgcagacatttgaaaagcgataataaacatggcattgaagctttttgcgataaaaagtccaaagtgatcatttccaaacgacggaaatgcctgatcaagcgggatatactgaaagctgtaataaatcccgtccaataaaagataatgggcgtttacgctgagcataaataacagcgccagcgtataaacgaattgtccgatcagcgggctttgcgttcctgattgcggatcaatgacattggcgatggaaaagcccatctgaaaatcaataaaggaacctgctatctgaatggctgtcatcatcatgaaagcgatcagcccgaggctcaagcccacaacggcctcttttatgacaagcagcatatactgttcccctatttctatttccggcgcatgtttcagcgtgctgaagcagatcaccgaaagaaaaaaagcaaagccgattcggtgaaccgccggcagattccgatgtccgaacaccggcaccgttacaaaaaaagcagagattctgataaagaccaataaaaaagcgggaaataaatcaatgatggaattcatttgattctaccctgcaaatcggttcagatgagaaaacagatcagttgtgaacgaaagaatcgtcgacagcatccaaggaccgaaaaagatcagtccaagcatcaccgccacgattttcggaatgaacgcaagcgtctgttcctggatttgagttgtcgcttgaaagatactgacgagcaaaccgacgatcagcgcgatcgcaagcagcggcccgctgatcattagtgttacatatacggctttttccgccatggaaattacaaattctgaactcacaattagcacctaccctaaaagctgtcaagcaaagatttcacgattaaataccatccatcgaccaaaacgaaaagcaatattttaaagggcagagagatcataaccggcggtagcatcatcattcccattgacattaagacgctcgccacgaccatatcgataattaaaaacggaataaaaatcataaagcccatttgaaaagcggttttgagttctgatatcgcataagcgggcaccatcgtcgtcaaaggaatatcctgaatcgattcaggttttttcattttggcatagttcataaacagcgccagatccttctgccttgtatgcttgctcatatactctttaatcggcttctcggcttttgtatatgcttcatcgagactgattttattgtccatcagcggcgttaaggcttccttattaatctctgaaaaagtcggcgccataataaaaaacgtcaaaaacagcgcaaggccgattaaaacctggttgggaggcatgttctgcgtcgccagtgaggttctcacaaaagacaggacgatgacgattctcgtaaagcaggtcatcaaaatcagaatccccggcgccactgaaaagacagtcaaaagcagcagtaatttaacagtggagctgacttcggtcggactgcttgaattaaaaagattaataaattcattcatgatgataagggcctttcttctttccttcagaacggctttgtttcagctcgttcagctgttctttcagcgcttttgaaaacgacggaagcatcgtttgcggttttttttctccatccttacgcggatttacgagcttggtccattccacttttgaagacatcgactcttcgtattggctcagaatcgcctcgcgctctttttcatcttcaatttcttttaaaagctgtatcgtttcgcccacaccgactacgagaacactgtttcccactttaatcagctgcacggaacggttttggccgactgacgttccgccgatattttctacatattgaaacggcttcagcagacggtttcttctattcatcagtttgacaaatccatagatcagcagaatgacgaataataacgccccaatcatctttacaaaatcaaaagcggagacagaagatgcagaagcatcccctatctcttgatcagccgtttgtttcgatgtatcgctttttttctctgttttgtttgttgattgtttgtcaaaccattcgttgacggtggaattgtcagactccgccgcaaaagcagggaacggatgtacattgagtaaaacgaaacaacaaatcaaagctagtaaaccatgactctttttcaacagtcgtacaccctttagcttaatgttttattaatagcttcaagcacgcggtccgcttggaacggtttcacgataaagtcttttgcgccggcttgaatcgcgtcaataaccattgactgctggcccatagccgaacacatgatgattttcgcctgcggatcgatttgtttaatttcctttaaagctgtaatcccgtccatttcaggcattgtaatatccattgtcacaaggtcgggggaatgctctttgaatttttcgactgcctgcgctccgtctgaagcttcagctacaacgtcaaaaccgttcttcactaaaatatctttgatcatcattctcataaatgctgcatcgtctacaattaaaattctgtgtgccataatctgtttctctcctctatgttcgcttattttaaattgttaaggcggtctgcctgacttaaaatatcagtgactctcacgccgaagttttcttctatgacaacgacctcgccctttgccacgatccgctggttgaccagaatgtcaacaggttcaccagccagcttgtcaagctcaataatgcttcccgcagaaagttcaaggatttctttgacgcttctcttcgttctgccgagctcaaccgtaacggaaagcggaatatccatcagcatatcaaggttattccttgatccttgcgccgcttcgttatgatcaaatgcctggaattctaccggagcgacttgaacaggagcagctttttttgcggttccctgtctcttcggaagctcgggttttgcctgcggctccggctgcatggcaggttccggctgcggcgtttcgtatgtttgctgaggttctgatacagtttctgcggcctctgactcatgctggtctgcagtcatcaggtctgcgatcagatctttcgcaaacgtaatcggataaagctgcatgatgctcgaatcgattaattcgccgactttcagacggaatgacacttttacgagcaggtcatcctcaggtattctgtcggtccctttttcttccgtcacatccagaagttcaacccttggcggagaaatgtcaatctttttactgaacacggtcgacattgacgtagcagccgagcccatcatttgattcattgcttcctgcacggcgctcaggtggatttcaccgagtgacggatcggcgccccggccgtccccgccgatcatcaaatccgcgatgatggccgcgtcgctttgttcgacgacgagcaaattgctgccgtcaaagccttctgtgtagttcacttcaatggcaacatacggatgaggaaattcatcactgattttgctttttgaaatgacggtcacactcggtgtcgtaatgtccactttttgatttaaaagagtggacagcgccgtagccgagctgccgaacgaaatattcccgatttctccgatcgcatcgcgctcaagttcagacaagttcgccccttgaggctgttctgtatcctctgactgactgcttgtgccgttaagaagagcatcgatttcatcttgagataatctattgttcatcttgttcacctcttatgtcgtgatctaaaatttgcactgcctgtcttcgattcacccggccggcctgccctaaaaacttcggtttgtttccgaccaatacagtaagaggatcagtcactgatttgtccagagttatacagtccccgacttccaaacttaaaaattcttctattgtcagttcagaagcgcccaagagagccacaacgggaatttgagccgtcatgatgcgcttttcaagcaacttcgtttcttcgggcttcgcttcattccggtctgattgcatccaataatgtacggaaagcttagggataatcggctcaagtacgacatggggaatacaaagattaatgacaccgctgatttcacctatctgcgtattgagagaaatgacaacgactgtttcatttggggaaaccatctgtacaaactgaggattcacttcaaattcagtcatttcagggtcaatatcagcaatcgattgccacgcttctttgtagttgcccagtgcattttcaaataagttagaaataatattcgtttcaatttccgtaaggctgtcagctttgttatgagtgatgccgatgcctcccatgacgcggtcaagcattgcgtatgcgatggtgggattaacctccatcatgattctgccttccatcggatgaacatcgaataaatttaaaatcgtcatgttcggtatggaacggataaattcttcatacggcacctggtcaactgagctgacggatatatgaatatacgttctgagcttggcggaaaagtgtgttgtgagaagcctcgcaaagttatcatgtatccgggttaaactgcgtatctgatctttcgagaatctgagagcccgtttaaaatcatatacctttacttttttctctttaacttcctttttcagctcttccgcatccgcctcacccgtggaaatggcggaaagcagtgcgtctatttcattttgggagagaacttctcctgacattttcttcacctccgtattctgtcaaatttgtttttattgcagattaaaggaggtaatgtacactttctgaacttttccttcttggagatagctgtttactttctcttttaatgattgtttaaacgcttctcttcctttatctccctcaatctctccggcgcttgtgtcagctaaaatggaaatgatgttgtctttcacctgaaaatcgcgtttttcaagttcttccttcgctttagccgagtcggtttcaagcttgatgccgatacggatgatgctgtcagactttaagtttgtcgtgatatcgtcgacagacacagtggctgcaacgacttcgtcaattgtcggctttttatctttgccggaatttccgctgacgacaaaatatgctgccgttccgaggccggcaatgacaattaaaataatcagcaaaatgatgactaattttttcttcattcttcttcctctattccctgatccagtgaaaatatttgtatgctatggtaaaacgatatgacttttttgagaactgcttcttccggttctttcactacgaactttttgccgttggacagtgtaatcgtcgtgtcggggaagcactcaatctgttcgataaacagcgcgttcagcgtaaaaggctggccgtttaaacgggtgacttgaatcatgcaatccggagaagcggccttaccgcctctcctccctccttaccgtttcagattaaccagctcctgaaggatttcatctgaagtcgtaatgatttttgagtttgattggaaaccgcgctgagcaacgatcatttcggtaaattcatctgtcagatctacgtttgacatttcaagatagcctgccaaaagcttacctgttccgttttcgcccggagtggtgactgcgcttgcagctcctgaacttaatgattctctgtaaaggttgcctccgattttttccagaccggcgctgttagggaacgtgaccagaccgatttgtccggcatcatgaacctcatcccctgcatcagtgtatgtaacggttccgtctgcaccgatgctgtaatctttcgcatcagtcggaatattgattttgccgccgccgattttttcaagatagtatccgtcagtcgtaacaaggttcccttgattgtcctttccgaaattccccgcacgtgtgtaaacaattcccgcacctgtattaatctgaaagtagccgtctccgtcaatggctaggtcggttttattctgtgtagcctgcggggcgccggttgaatgaacaacatcaatggaagaagtcgcggcacccaagccgatttgttttgaattggtcacgtttgaaccgccagcgactgtctggctgatcatatctttaaatgtaacgcggcttttcttaaatcccactgtgttgacgttggcgatgttattgccgattacatctagttttgtctgaaagtttttcatgccgctgataccggaatataatgaacgtaacatgttaaattccccctgagtttcttattatttagatgtttcgctgacggccgtgacattccacggactgacctctttgccattttcaagcacgagcacgtaattgccgtttgaatgcttgactgaattgactgggcttgtctgatccttcccgtcgctgtcgctgaatgtgacatttttgccgatccagttcacatacatcgtaaacggatcttgattttctacaaatttagtcatcgtcgtattcatattcatcatttgctccaatgaagaaaatgtcgccatctggctgatgaattctttgtcatcaaccgggttgagcgggtcctggttttgaacctgtgtcattaagatcttcagaaattcgtctttccctaaattcgtgctgctgtttactgcggcggtgctcttcgcgcttgaagtggttgaagcgcccgccgcggcataatccgagtttactgatgtcaactattcttcctccatttcattgagagaaagctcctccagcatatctccgaaatcgcctgactgctgctggttcttctgctctctctgtccctgatgctgctgtttattgtgatcggccgtctgcccgtaaacaggctgctgatccccgctttgaagggggactgtaaaacggtcgacctggaccgccatattcggaagcgactgtttcagctgaggaagatgctgttccagcagctctttcgcggactggctggatgcgattattttgctttgaaacatcccgttttcgtttgtcaccttaattgtgacaaatccgaggttttcgggattaagacgaatcgtaaagcttccggttgttttcccgaaaggcgtgtatttcatctgtttccagccgcttatgacctgatccgttaacggtttattttctgccggctgctgttcagctcctgcggacgtttgctgaatgccggcaaggcttctcgttcccgacaacagtatatgtgcagacaatttgctgtcaggcgcctttgcgtgagaaaccgtgccgccgttttgctgttctgttttcccggctgactcttgggatgattcagatgattgagataacacaaaagctttcagctcagtttcagccatatcccattcctttgttcccttttgagaaaggcccgcaagctgctccgcgacgctttgaaagctcttcagctcagcggctgtcatggagtaaagtttagatgcagattcgtttttcggaaaaaatgtctgccgcaggtcttgaatcacgcggtctgggacaccttgttttttcaatgcctctaataaacgggcgccttcctggtaaaccgcctttgcctgcgcgctgtccggcagttcctgctgagatgtgaagagctgggatacagcttcttgaatgaaaagcagccccttctcaagcgcatccttgacggaatccccgtcttttgcgtaagaatccggctcatccgtttcaggcttcgctccatgctgttttcccgctaacatgtcttcaacagattcggcaagctgtttcaataaaggaagagctgtttcagccgtctgctttccttcaagagcttttaccgcctcaagcagctgttttagctgcaattctttatcttccgggccggctttcagccaatcaccgattttcgataaggcatcattcagctctgcgtcacttgtttttgtttcatctccgggctgccggggagaagtgatttccgacaggagccagttctgaaatagacctaagctgtttacattcatcttcacattgctgttttgcacagtctgcgtacgattacccgttaattcaagcagcttcaacttacatcactccttatttccgtcagcggatagtttttctgtatatttagccgcttgttcaggagtcattttcgtcaagatttcagcaagctgctttttacttaatccgtttaaaatatcgagggcttctttttctttcagctttacgataatgcttgccgctttaccgctgtccatacttttatagatgttgatcattttatcttttccggctgaatccgcagcgtcttttttcgtttcatccgtcttcgttttctgctgctgttcagcttcctgtttcagtgaacggattttctgattcagattatcgatttcggacttgcttgtgtctaaatctttattcaaaatgttaatttcacttttttgttcctttatggtcttttcaagagaagccgttctgtcttccttctgcttttccgccgcgcttttcatttctttcgtttcgggaaccaattcttttaaaacaggcgttttagcggctgtttcctgaatcggcttcatcacatcaacgccggcagcccaaaggatgatgcttgcgacgatgatcagaaaaatcagcgggatcatgataaaaagcaggattgaaccgaactttccagatctcttttctttatcggccatttcattcgctcctaatgcccctgaatcataaactgcttgattgaaatgtcgtccatttccctcatctctgcagctttgtcttcaagtgcgaacatattaaattgtttttcccgcattttttcaaatttctttacttcaatgtttttttcggtgagctgttcctgcttctcattcatttcatttcgtttcatgatgacaagcttttgataatgatagatggtgttctcaagattggaaacgaattgctgataatgtctcatttcctgaacgctcatcccgcatttcagctttgattctttgtctttttcgagcaattcttttttgctcatattttcatatagtttttcagccactgtctcaaattcagaaaccgattgtctgtattcagtcaatgtttggtctttttcattttcttttaattccagcagcttttgaaatctgaattggtatgccacgatgtttattcctcttttccagtcagactcgtcaatgccgcaatgctgtcttccaattgagcaggttcttccgttccttgttttaaaaattgaataagctgcggataaaactgaatcgcttcatcaatttctcttgatgatcctcttttgtaagctccgatattaatgagatcttcagagttttgataagttgacagaagatcgcggaatttgttggccgcctctttgtgcgctgtgtctgaaatattagacatgaccctgctgatgcttttcaggatgttcacggccgggaactgccctttgttggcaagcgcccgatcgagaacgatatgcccgtctaatattccgcgcaccgtatcggcaatcggttcgttcatgtcatctccgtctacgagaaccgtataaaaagcggttatcgttccttgttcattcgcgcccgttctttccagcaaacggggcaaaatagcgaacacagaaggtgtatatccttttgttgtcggcggttctcccgctgccaggccgatttcccgctgcgccatcgcgaccctcgtcacggagtccatcatgaacatcacattccggcctttatcgcggaagtactccgcaatggcggtggccgtatacgccgctttcaaacgcattaaggcaggctgatcagaggtcgcgactacgactatcgagcgtttcaggccttcttcgcctaaatccttctcgatgaattcacgcacctcgcgcccccgttccccgacgagtgcgataatgtttaaatcagcttcagtctgcttcgcgatcattcccatcagggtgctttttccgactccgcttccggcaaaaatcccgattctctgcccttttcctaccgtcagcagactgtcaatcgatcttacgccgacacccatcttttcccgtatcggcgggcgtttcatcgggtttggcggcggctgttccgtcgaaacgggggacaaacctttcgggagcgcccggccgtcaagaggttcgccgaacgcgtcgacaacttgtccgattaaacccgcgcctactttgatgcggagcgactcgccagtggcctccacaatgctgcccggcgcgatgctggccgcttccagataaggcattaacagaatgttttcatcttggaagcctacaacctcagctttaatcgcttttttcgcatggcctttcggataaatgagacaaacatctccgattgagctttcgggcccttttgattcaatcatcagcccgatgacccgtttaaccttgccgtagcgcttgtacggatccgctgtttcaattgagtctattaaatactgtgtcttcattgctccgctcccgcctcaagcgccgttaaaagcttttgctttaattgcatcagctgggtgtctatgcctgcatcaacacgtccgaacggagtttctatcgagcacgttcccttcgcggcttttgcatcggcatataagcttaatctgcattctttgtataacagctgctgaatttcgtccatatgctgatgaaccgtctcataatattcagggtccacatagatggagatgtcatcataatctttcacttcggctactacctgtttgaccagcagaaggaaagcctctttatcatcacttttttgccgccatacttttttagcgagcgcaacggaaagctcaatgatttcttcctcagcgctttccagtttttcctcgactgactgtctcgccatttccataacggcattggcccggctgatgagattggcgtattcagcttgagcctcggcttttcccaatgccatgccttcttcatatccttctgcctttgcttcttctatcaatctttgtttttcttccgcccagcggtttttcgcttcttcaatctgcagaagagtgtgctctaattgatttttcgcttcttcagacaccctgtcggcttcggccttggcaaaggccatgagagcctccggattttcgggttcctcccggtctggatgggaatgtgatttcctgacttcctgcaaggaaagcttgcgccgtttttgttcaggagaaaatgatgattgctgtttaatgatattagacaataatatcgtctcctccgcctcgcgcgattacaatttctccggcttcttccagcttgcggacgacgcccacgattcttgattgcgcctcttccacatcacgcaaacgcacaggccccataatttccatttcctctttaaacgtttcaaccatacgctgtgacatattgctgaagacgatttctttgacttcctcgctcgcaaccttcaatgaaagcaggaggtcgtcgttttcaacgtctctgatcacgcgctgaatcgcacggttatcaagggtgacaatatcttcaaagacaaacatccgttttttgatttcatccgccaactcaggatcttggatttccaatgaatcaaggatcgttttttccgttcctctgtctacgccgtttaacacttcaacaacggcttctatgccgccggtctgcgtataatcctgcgtaaaggaggaggacagcttttgttcaaggacccgctccacttcatttatgatttcaggagacgttctgtccataaccgcaatccttcttgccacctcagcctgaacgtccgggttcagctcagacaaaatctgtccggcctgcaccgggtcaaggtaggataaaatcagcgccatcgtttgcggatgttcctgctgaatgaaatttaaaatctgttcgggctccgcttttctcgcgaaatcaaacggctttacctgcaaagaagaggtgagcctgtttaaaatgcttaccgctttgtcttctccgagcgctttttcaagcacttggcgggcgtaatttaaaccgccttgtgaaatatagtcctgagcgattgcgatattatgaaattcttcaatgatttcatcttttctttgatgatcgacgcttctgactcccgaaatctcgagtgtcaatctttcaatttcttcttcagacaaatgcttgtacacagaagctgatacatcaaggcctaaggaaatcatgaggatggctgctttttgttttcctgtaagcttgttctgatcacgtttcgccattttccattccccctaatcctcgtccagccagcttcgaagcaatttagcaaagtcttccggtttttctttagccattttttcaagctgttttcgtctgactgtttcttccgtttcaattttctcttcgttgatatcaggcaatcgaaccggctcgggcggtgtttcatattcatattcttcgtattcatcctcttgtgagcgtttctttctgatgaggagaataataagcagaataatggccgcaagcagtacgccgcctgtaatgtatacccagatcggaagacctgaagattgtgccgaatctgtgttcaggcttgtttttccgtcaaacggctgaacggatacaacgattttattgttgatatcattgtctgtcaggttttgattttgcgtttcgtttttatcaagagacgttctgacgaccgttcctaaaatcttctgtatatcagcctgtctctgtgctgataaggaagcggcatttttcggattaggcggctccaccatgacctgaatgcctaaatcacgcactttatacgggctttcagcgatttctttatgaatgcggttgacttcatagttgattttattgctgcttttttcgtagtccccgctgtttgaaccgccgtttgtctcggcatagttcgcggtgtcattgcttcccgttccggccgtgccgccgttggccgcgccgtcgcctttatacgtttccgcaactttttcggcgcttaccgctatgccttccatgttatctttatcgacaggttcgacagtgtcttcagtgcgtttttccttcgtgaagtcaacatccgccgtcacggaaacaacgaccttatcctgccccatcattgtgccgagcagtgactgaacatgtttttgaatgtccttttcgacctgcgacttaataccttgctgagaagcataactgtcagaaacggaccctgcaccgctgtcacttttgtcataatatgtagaattttgatccattatgacgatattatcttcttttaagttcggaacacttttagaaacgaggtggtacagcccgttgatctggttttgatcaagcgagtagcccggtttcatctgcaaaacgattgatgcggacgctgccggctgatcttcaccgacgaacacggcttctttcggcatattgatcatgaccttcgagcttttaataccgtccatttcatttatcaggtttgacaattcggtctgagtcgcctcaacctttaaaacgtcaaactcattatccgtcaggccgaagcccgcattttgtccgaaaaacgaataatcaattgatcccgttttcggcaggccttccgcggcaagctggactttaagcgaatccacttggctctcaggaaccttaatgaccgtgccgccgtcagcaagttcagaagacacctttttcgtatcgagctcttctttaatcttccccgcttcttccgcggacaaatctttataaagaggcaccatcttttcagacgaagtaaaaataataacgacgatgagtaaaataatgaatgcggccaagccgcttaccatgagtatcttctgtgtttttgatctgttgttccaaaacgctgccgttttggttttcatttgcattagagtacgattcatgttaacccccggtcattccagtcattctctttaatctgaccactacatctgcattctcatgatttcctgataggcttccacggctttattgcggaattcggtagcggccgtcagagaaatatttgctttttgggcagcgatcatgacctcgtcaaggtttacatcctttcctgcagccagttcgttcgttatttggtcagattttacttgtgactcatttaacgaatcaatagagttttttaaaagctccgaaaagcttgtttggtttgaagaatcagttttttgagtttggtttaattgattcgttacgttttgagtgttttgggtttgttgaagctgaaaaggagtaatagcgttaaccacttacatcaccttactttccgatttctaacgccttcaaaagcatgcctttggaagcgtttaatgcagttacgtttgcttcgtatgatctcgagctgctgacaagatccaccatttcctttaatggatctacatttggtttttgtacatatccgtctttattcgcatcaggattctccggatcataaacgagattaaaagcggacgggtcttccgtaacaccagatacctttacgccacttcccgcgcttcctgttccgttcatcttggaatgtaaaagggacgaaaatgattcgcctccggattggagagataccagctttcttctgtaaggcacccattcgccatttacctgcttcgctctcgttgtatccatattggccaggttggacgatacgacgtccatccggacacgctgcgcagttaaagcggaacccgaaatatttaagctttgaaagccactcattattttcctcctgtcaagacggttttcagagaattgaatttgccgctcattctttcaaccaaagcctgataattaatttggttttcggctaaatctgtcatttctttgtcgatatcgacattgtttccgttttgctggtacgatgtatcactgctggacacgatagaataatcgtcccccgaacccgtaaagtcaacgtgccgatagtcggtttttacagcctcaagattggatgtttcctgatctaacaaatttcggaaagagactttttttgccttatagttcggtgtatctatattggcgatattattagttaagactttttgcttaatgtccgctctccccaaggcattctcaagattttgtatagttccagaaaataagtccaaatccacttacctccatttcagatatttttctcctaaaaatccttgtcgagaattgtaaaaccatatgcttattgtaagaaataacaggcttaaagtctatgaagttaggctaaaaaaaagtgctcaattatatctattttgcatgtaggtattaagtcctagaatatttgtactacaaggatttgtttaatataagactgaaaatagcccaatttctgtttcttcctccttttttcacacagcaagatggattatctcagatcagattccaataagcaactttaaactgcaacttttcacctattgtccataaaaaaagcagaacccccattttcagggatcctgcttttgtcttaatgagatttaaggttttccaattcaataaggaatttgttgttcagaactttaatgtacgtccccttcattcccagtgatctggattcaatgacgcctgcgctttccagctttctcagcgcgttaacgattactgaacgcgtaatgccgacacggtccgcaatcttacttgccacaagcaagccttcgtttccgtcaagctcttcaaagatatgctcaatcgcttcaagttcactgtaagacagagaactgatcgccatttgaacaaccgctttgcttcgcgcctcttcttcgatttcttccgctttttctcttaaaatctccattcctacaacggttgctccgtattcagcaagaatgagatcatcatcttcaaattgatcctgcagacgggacagaatgagcgtgcccagtctctctcctccgccgatgatcggcacgatcgttgttaagcccgcttggaacaggtctctgttttccacaggaaacgccgtgtattcgctgttgatatcaaggtttgaagacgtctccggaacattgaacagatttctcgtgtactcttccgggaactggcggtcttcaagcatttttttcatgcggtcattttcaatctgctgattaatagagtagcccaaaagctttcctctgcggctgacgacgaaaatattagaatcaatgacgtcacgaagcgtttcagccatttctttaaagtttacgggtttgcctgccgcagcctgcagcatgctgttaataattcgtgttttttgtagtaaagccatgataaataatcctcctagaattcctcttattaaattttcacaatataaattgacttagatctttgttgtttgcaatcgttccgagcttttcttcaacgtattgcggcgtgatggcgactttttccatcgtcacgtccggcgcttcaaacgacaggtcttccaagagacgttccaatatcgtgtgaagccttctcgctccgatgttgtccgtatcctgattcacatgataagccacttcggcgatcttacgaatagcttcgtcagaaaattcaagagatataccttctgtctgcaataaagcctgatattgttttaacagcgcgttatcgggttcgacgagaatcttcacaaaatcatctaccgtcagcttgctcaattctacacgaatcggaaagcggccctgcagctccggaatcagatcagacggtttggccatatggaatgccccggctgcgataaacagcacgtgatctgttttgacggagccgtatttcgtgacgacggtagatccttcgacaatcggaaggatatctctttgaacgccttctctcgatacatctgctgaggaagaagcccctccgttttttgcgattttatctatttcgtcaataaagataatgccgccctcttcagctcttaacacggcctcttggccgacttcatccatatcgattaatttgcctgcctcttcattggtcagaaccttccttgcttctctgaccgtcattttgcggcgttttttcttttttggcaccagattgctcagcgcatcctgcatattcatgcccatctgctccatcccggagccttgcagcatgtcaaacatcgacggctgctgctcttccacctctacggagacgtaatggtcttcgagctctcccaatgcgagctgatgcgccatgcgctttcttttctcttcaaggcttgcttcttcctgctggtcggcttcatcatcatttgccgcctggtttcctccgaaaagcatttcaaacggatttttcacacccgcttgttttttctttcccggaacgagaagccgcactatacgtttgtttgcattttcttcagcctgttctttcacttcgctgattttttcttctttaatgagccgcacggatgtctcaacgaggtctctgaccattgattcgacatctctgcctacatagccgacttctgtaaattttgtcgcttcaatttttataaatggcgcaccggtaagcttggcgatccgtctggcgatctctgttttccccaccccggtcgggcccatcatcaggatgtttttgggaacgatctcgtctctcagtttttcatcaagaagacttctgcgatagcggtttcttaatgccacggcgacagcttttttcgcatcctgctgtcctacaatgtattgatccaaccgatctacgatttgtctcggtgttaacggtttgttttccatgcgcctcaagtcctttctattcaagttcttccaaaatgatctgatcgtttgtgtacacacaaatctcgcccgcgattttcaaagcggcttttgcaatatctttggcggacagattctctccggcataggttttcagcgctcttcctgctgacagagcgtagtttccgccggagccgattgccaaaatgccgtcatccggctcaatcacttcacctgttcccgatacgagaagcaaggtatcctggttcatgacaatcagcatggcttccagcttgcgcagcactttatcgctgcgccattctttcgcaagctcaaccgacgcacgttttaaattgccgttgtattcttcaagcttcgcctcaaacatttcaaaaagtgtgaaagcgtctgcaacagatcccgcaaatccggccagaacctttccgttaaacagctttctcacttttctcgcggtatgtttcatgactacagcctgaccgaatgtgacctggccgtctcctgacatagcgcttttcccgttatgctggacggcaaaaatcgttgtcgcatgaaaagatgacatgagaagggcctccttttaattttctttaaaagctctcgggtggtgggacatatatgtgtttctcagcatttccttcgatacatgtgtgtatatctgcgtagaagacagattggaatggcccaaaagctcctggacgcttcttaaatcagccccttcattcagcagatgagtcgcaaacgtgtgccgaagcatatgcgggtgtatatgtaaagtgccggatgctttttttacaagcccgcttaaaatataccggattcctctggcggtcagcgggccgcctctttgattgacaaacagcacatcatgaggctcttttgctttttcaagcaggcactgccttccgctgttgatatacagctccagcgcatcacgggcatatgagccgaacgggatatagcgctgcttcttgcctttcccgtgaacgagcaccgtatccatgaacaggtcaagatcgccgacagtgagcgtacagcactcactgaccctcattccggtcgcataaagaagctcaagcagggcctgatcgcgcatccctgacggctgacttctgtctgaaacagcgaatagttcctcaagttctttttcataaagaaacttcggaatccgtttctcttgtttcggcagatgaacaagctgaaacggattctcttcaacaagcttttccctcattaaaaatttatagaagcttctcaaagctgaaattttcttgctgattgtttttcttgacaggcctttttcataagcctctgtcaaaaatattctcacatcatgatatgcagcttctttcattccatttatattttgagcatgcagaaacatcccaaattcttcaatcgaattaacataattcacaatagtatattgtgaataatttttttcaatttgtaaatattcaacgaataactttaaaaaaaagttaacattctcagtcattatgaagacctccctctccgaagggcttttaaatggtatcatataatgcatcgaagttgcaatgaaaagctatatcgttttcgaaatagtttgaatagtctcaattgcgcgtttagcgtattcttcatttcgttcttttttgtttttaattcttacaggcaattcttttaagaggccgaagtttgcattcatcggctggaagttcttctgatttgtcgtcgtaatgtagtgagccatgcttccgatcgccgtctcctgcgggaatgtcacaagatcctgaccgagcacaagtttggcggcattgattcccgctacaagacctgaagcggcagattcaacataaccctctacgccggtcatttggcccgcgaaaaacagatcgttccgctgtttaaattgatatgtcgggttcaaaaggctcggcgagttgataaatgtgtttctgtgcatgacgccgtatctgacgatatcaacattttcaaggccggggatcagtttaagcacttctttttggtctccccattttaaatgtgtctgaaaacctacaatattataaagcgttcccgccgcgtcatcctgtctgagctgaacgactgcataagggcgcttgcctgttttcggatcttccagtccgaccggtttcatcggtccgaacagcatcgttttcttgccccttttcgccatgacttcaatcggcatgcagccttcaaagaagatttctttctcgaattcttttaaaggtaccgtctcagccgtcgtcaatgcttcatagaaacggtcgaattcttcctctgtcatcgggcagtttaagtacgccgcttctcccttgtcataacgggattttaagtacactttctccatatcgaggctgtctttttcgacaatcggcgccgccgcgtcataaaaatacaggtactcttctccggtgagctctttcagctgctgtgaaagcgattctgacgtaagcggtccggtcgcgataacagtcggaccttccggaatctctgttacttcctcagtaagaaccgttacgttcggatggtttttcacgagatccgtcacgctttgcgcaaattcatgacggtcaacagcaagcgctcccccggccggaaccgagcatttatcagcagattgaatgattgccgagtcaagcgcccgcatttcttcttttaatacgcctaccgcattggcgagtgtatttgaacggagggagttgctgcataccagttcggcgaatttatcagtatgatgggctgccgtctgcctgacgggccgcatttcgtatagttttacttgaattcctcgttttgcaagctgccatgccgcttcacttccggcaaggcctgctccgattacattaactgtttgctggttcatttcttttcatctcctgttgtttgtcccttccacacaaagaaggtgagcaaggcactgctcaccgctacttctgtggttcttccttataatcgcattcgacgcattggacttgtatgccttttttaagctttttctctacgagcatattttcacatttcgggcattttcgttcaatcggtttgtcccaagatacgaagtcgcattcaggataacggtcacagccgtaaaagatgcgtttcttttttgattttcgttcgacaatgtttccttcatggcacttagggcattttacgccgatttgtttgacaatcggttttgtattccggcagtcagggaaattggagcacgccataaatttaccgtatcggcccattttataaaccatccgggagccgcataactcacaatcttcatcggcgtattcaggttcaatttccacttctttcatttcggcttccgcttttttcacgcgtttttcgaaatcagtatagaagctgtcaatgatttgaacccattctgtctggccatcttcaacatggtcaagatctctttccattttagccgtgaattcaacgttaatgatttccgggaaaaactccatgataagatccagcacgatctgcccaagctcagtcggcacaaaccgtttattgtctaatcccacgtaaccgcggcgctggatggtgtcaagagtcggcgcatatgtcgaaggacggccgatccccagttcttcaagcgttttaaccaggcgcgcctctgtataacgcggaggcggctgagtaaagtgctgctcaggctcaatatctttcgataaaaccgtgtctccctctttaaggtccggaagcatgcggtctttttcttccagctgatcgtctttaccctctacatagactttcatgaagccggcgaatttgactttacttccgtttgcccggaatgtcaatccgttattgctgagatcgacgctcatcgtatcaaggacggcaggcgccatctgacttgcaacaaagcgctcccaaatcagcttgtataatctgagctggtctcttccaagcaccgcttttaagtcggcaggttttctgagcaccgaagtcgggcggatcgcttcgtgagcatcttgtgcgttttcatttttctttgccggtttccgttttcccgctaagtactctttgccgtacgcctgatcaataaaagctgacgcttcttcaacggctgtattggaaatccgcgttgagtccgttctcatatacgtgatgagcccgactgtcccttctttgccgagatcaattccttcatataattgctgcgcaatcatcatcgttttcttcgctctgaaattcagctttcttgcagcctcctgctgcagagtggacgttgtaaacggcagagcgggatttcgtttgcgctcttttttcgtaaccttgtcaactgtatacttattgcctttcagctgagcaaggatggcttttacgtcttcttcgctttttaaaggaagctttttgccgtttttcccgaaaaatccggcttcaaacgtctcttttccctttaaaaatgagccggtaatcgtccagtactcttcaggtttaaagtcattgatttccttttcccggtcgatgatcagccggagcgcaacggattgcacacggcccgcactgaggcctttttttacttttttccaaagaatcgggctgattttgtatccgacgagtctgtctagtatgcggcgcgcctgctgcgcatcgacaagatccatattaatcatgcgcggatgtttaaatgattctttaatggcgtctttcgttatttcattaaagacgacccggcagtccgagctgagatccagatcaagactgtgtgcgaggtgccatgcaatcgcttccccttctctgtcggggtcggccgcgagatagactttttttgctttctttgccgctgtttttaattcttttaaaacagggccttttccgcggatcgtaatatatttcggttcaaagttctgttcgatgtcaactcccatttgacttttcggaagatcccggacatgtcccattgaagctttgactttatatttcttccctaaataacgttcaatcgttttcgcctttgccggcgattccacgatgactagataatcagacattttcatccccctcaagaggtgttctctctcttttcaagtatcaattcattttagagctgcctttttatggctttcaacatttcattctttatgatgaacgtcattttatacatgaaaataatgtgcaactttaaatcctcactattattaaatattacaataccgtttgtcaaacgatatttcaaaagggttccgtatactgaacgcatcgggcggtcagctctccgtcaatatcctctgcgcataatacagctttcgccccttcttgaatgagttttataggtcctccggaatatggattaaatatggaacccggaacggcaaatacctctctgccttgatcgagagcctggtaagctgtgattaatgaaccgcttttttcttttccctgcacgaccacaattccttcacttagtccgctgattatgcggtttctcatcggaaagtgccattttttcggctttgtttcaggaggatgttctgagagtaggagatggtgttcagccatgtattctgctaacaggagattttcccggggatagatgtgatggaatccgccggctatcacgccgatcgtaagcccttttgccctgatgctcgccttatgagacaatccgtctataccggatgcaagcccgcttacaatgacccagcctttttttgagagttcggcggaaagatgcccaaccgcttttattccgtcttccgtcggtttccgcgttcctacaatcccgatttttctgcctttttcaagaagcagcgtgttcccttttgcatacaagacagccggcggatcataaatcgctttaagccatgttggatagcggcttgatgaaatcggaatgacagtaatgccttcgcggcggtaatcggacagaacttcatcaagtttcggatccttgcgctctatttcccgaaaaattgcttcccgggctgttttcccttctgataaaacagttaatggatgcggatccggtaaaaaagacagagaatgatcagctttccaccattttaatagaagagacggggaaatgatttgattaatactgcagaccattaaacagcgcgatgcttgatccaaatctggaaacctcctctttttttcagcaaaaacaggaacagccgttacggctgcccctgcttcgatcagtgcgttttgcacgtttcaaataagcctttttcttttaacaccttaatcagcgtttcacccattacagaaggggtttccgcgacttcaattccgcaggcgttcatcgttttgactttttcttctgccgtgccttttcctccggagatgatggcgcccgcatggcccatgcgttttcccggaggcgcggttttaccgccgataaagccgacaacaggcttcgtcatgttcgctttcacccactcagccgcttcttcttcagctgtgccgccgatttctccgatcatgatgacggcatgtgtttcaggatcttcattgaacgcttttaacacgtcaataaagttcgtgccgttgaccggatcgccgccgatccctacagcggtagattggcctacgccggcttctgaaagctgatgaacggcctcgtatgtcaatgttcctgaacgggacacaacgcctacatgaccctttttatgaatgtatcccggcataatgccgatcttgcattcttcaggtgtaataacaccagggcagttcggccctattaatctcgttttcttgccttccataaaacgcttcactttcaccatgtccaaaaccggaatgtgctcagtgatacaaatgacaagatcaatttccgcgtcaaccgcttccataattgcgtccgccgcaaacggagccggcacgtaaataactgacgcatctgcgcccgttgtatgaaccgcttctgcgaccgtattgaataccggtacgccttccgcttccgttccgccttttccaggtgttacaccgccaacgatattcgtgccgtattccagcatctgctttgtatgaaataaagcggtagaacctgtaatcccctgtacaataactcttgtatctttattgataaaaacactcattatctggtcccctgcctttcattctttcctaaactaaggatacgattttctgtgcgccgtctgccattgattccgcagatgtgatgtttaagcctgattcattcaggattttctttcctaaatctacgtttgtcccttcaaggcgcacgaccagcggcaatgtcaatccgacttgtctcgtcgcttcaacaacgccctcggcgatgacatcgcacttcatgatgcctccgaaaatattgacgaaaattccttttacgttttgatcggaaagaatgattttaaaagcttccgtcactttttctgcggttgcgccgcccccgacatcaaggaagtttgcaggttctccgccgtagtgtttaatgatatccatagtagacattgcaagacccgcgccgtttaccatacagccgatatttccatcaagggaaatgtagcttaaatcgtattttgacgcttcgatttctttcggatcttcttcatctaaatctctgtattccataatgtctttttgtctgtataacgcattgctgtcgaagttcagcttagcatccagcgccatgacgtttccgtcccccgtaacgacgagaggattgatctcggcgatggagcagtccttctcaacaaatgctttatataaaccgagcataaatttagcggctttgccgacaagctctttcgggatgttaattgcgaatgcaatttcccttgcctgatagccctgaaggccgacagccggatcaattaccgcttttttaattttttcaggtgttttttccgctacttcttcaatctccgttccgccttcttcagacgccattaaaacgattcttgaagtagcgcggtcaagtacaagcccgacatagtattcctttttaatatcgcagccttcttcaataagtaagcgttttattacttgtccgtccggacccgtttgatgtgtgacgagcgtcttgcctaacagttcttcggcatactctttcacttcatcttttgtttttgcaatctttaccccaccagctttgccgcggccgccagcatggatttgcgcctttacgacataaaccgagcttgacaggctctctgctttttcaactgcttcctctgctgtaaaagccactttaccttcaggaacagacaccccgtattttctgaggacttcttttccctggtactcatggatattcatttcccatcctcctaacttatgtagcaaaactaaaaatagactgcgctttcattctatataatactggaagaattgtctagggttcaaaacaaaatctttatatccttccaaacattctaacttttattttattgaaaatataaatttaaacggagtccgggaaatgaatggtccttatttttcgtttttcagggtttcgtccagtctgtaaacaaatgaaaaaatttcggcaacggtttcatagagcgcctccggtatctgatcgtcaaccgtcaaatggcgcattaattcgacaagggttctgtcttcctgaatggggaccccagctttctcagcttcttttataatattttccgccacgtgccccctgcctgttgcgacaaccttcggggcttggtctttctgccggtcgtaatgcagggcgacagctcttcttaacggcgtttgctctttcatattttcacatccacttttcttccgccgtctttttctataaactcttccacaagagcgctctggtctttcgggcgccgttttttagccgtgacgcctgacaggctatagcccgtttcttttacggcttcttttaaagccggtacgagagggtcgatggccgcctgaagctcaaaatcagtctcaaccgtaatggtcattacattttgctgaatcatgcagtccacaagggtttcttgcagtgtttcaaggtgcagcaaaaacaggagcctgcaatgtgacggatcgagttttccgtccggcttcttccgtcctttaaagagaactgtgatgtcattctcatacgcggacgctcccagcggaaatgacagcaccatctgcgtaacagaaggattatgctgctcaataaacagctggccgtttaatttatgaataagcggttccgcctcttgtttaacggattggggcgcctcttgaagcgtccggacggcttggagggctgttttcagtgcttgtttctccggctgcggagatacgcctttttcaagcgctgtaatgaatgataattcatcacgcgtgcccagtccttttttgattttctgcaaaaggcttaatacatcatgtttttctgcatatttcaattcggtgagctgagcggctttttcgaaaacagccgcctcctgttctgtcagatgtgcgttttgaagaacaggtgctgttttcaatgttttttcttgagaaatgaaagccttaatgatctccgccgttacttttacgggacggttttcagttttttctgccgatgtcattaatttctctataatctgttttgccgttttttcaggaagttccggatttgcccttgcactcggaggagaaggctggcttgagactgcctttccgttttcacgagtctctcggacaaatggtgattgttttgattccgtccgttctccttcatccatcagcccggtttctgagagcggcatgcgtgcagcctcggcaagcttcttcaggagacgttctgcatgaagatccgtttctgcgtttaacacgtcagaaaccgcctctttgagcacagacagctcttttgccgattgcggagcctgattgattgcctgaagcagtcctgagaggaggcgccgggtcggaaccggatatttaacggcatgaatggctgacaagacttccggatgtgcgggcagttcccgtttcagcgcaaatacgattgtttccgccgcttttttcaattcggcggccggaagcgattcagcccagcggatgcaagctttgaggctgttttccgtcatcggcagcttctgctgcataaacgtttcggcaatctgcagagacacagggcccggtttgacagaaagagcgtttaacagtcttcccgccgcttcctgaacggttttcgggcttccttcgaattggtcaatgacatgaagccggcccgttttttccgccggctgtttgtcataagaaaaccagtaatacgcctgcggacgaagggcggtttcaagttttccctgcatcgtccggccgccgatttggataagagcgctttgatcgtccagcaaacggagaaccttccctaacagcagcctttgagagccgctgtctttaccgccgtcttgccggtccggagggatttccgccgtcagctgtctgaaagccgcttggatttcgccgcttatgttcatgtcttaagcctcttttctaacaataagattgaacgggagcgaacgtttttcggtgaatagttgtcggtccgtatgcctgaagagcttcaagatgttctttcgttccgtagcctttatttttttcaaagccgtacatggggtaggttttggcgtactcagccatgagacggtcccgcgttacttttgcgatgcaggctccggcggcaattgacacgcttttggcatccccttttataactgatgactgcggaatgtcaaggggaagggtcatggcatcaacaagcagataatcaggtgtttccgttaaagcattgacggcttttaccatcgccagtctcgcggcctcataaatgttgatccggtcaatgacgtccgcatggacaatgccgactcctactgccgccgcttcttccgtgatccggctgtaatattcctcgagcttcttttccgacaatttcttcgagtccgtgagaccgagaatctcgcattctgccggcaaaatgacggcgccggcgacaaccggtccggcaagcggccctcttccggcttcgtcaacacccgcaatcaggcggaagccctttttggatgacagtctttcgtatgccgtcatgttcagccattgctctttaagagctttttccttcgcgtgctttttcagccattgctctaaaagcgtctgtacgctttttctcgggtctttctcacattgggcaaggaaggggtcgctttcgtccctgacctcttgcaggcgttcttttacgctttttacggttaatgtattcacgttctcttctcccttacattatgtatatcggtattctgcggaaaaaataaagacccgcatcgctgcgcgtctttattctgatggtgtttcaaatgaaagcctgccgaatttttccgtccggatgtcccgaatgatgacttccgttgttttatcatagtcaaccattccgccgcccatcaaacagccgcgtttttcaccgatcgcgtcgaaaagagcggcgatatcctcagggatttcctgaagtccgtagcgctccttcaagcggtcgggataatgctcttccagaaagcgcagcccgaagacggccacatcctgcaggttgataatcgtatctttaatcgccccggtgatcgccagacgcaagccgacaagctcatcttcaaatttaggccataaaattcccggtgtatcgagcagctctaattccttgcctacctttacccactgctgtgaagtggtaatgccgggcctgtctcccgtcttggcaatgttttttttggccagccggttaatgagcgtagacttgccgacattcggaatgccgatgattaatgcgcggattgctcttggcctaacaccttttgctttcattttatcgaacttatctttcagcagctcttttgaggacggcacgatttgatgcagtccctgcccgttaacggagtttattgaaagagagggaatgccctgttcctgaaagtggtccttccactgtgcagtcacagccgcatccgccttatcggctttatttaaaagcataatgcgcggcttattttttaaaatctcctcaatcatcggatttctcgatgacatcgggattctcgcatccaccaattcgtatacgatatcaattaatttcagtttttctgttacttcccgtctcgctttagccatatggcccgggaaccattgaatggtcatgtgacttcgacacctgccttatttaccggaaccggatgttccgatgatctcttatgtattttacgttgcttgttccgcttttacaaatttcatataaaaaaagagcctgttacgggtaacaagctcttttcgttcgttatcattatcgtctgatttctttaatacgagccgcttttccgcgaagttcacgcaggtagtaaagcttagcgcgacgtactttaccgtaacgtacaacttcgattttcgcgatttttggtgtgtgtacagggaatgtacgttcaacgccaacaccgtaagaaatcttacgaactgtgaacgtttcgctgattccaccaccacgacgcttgatcacaacaccttcgaagatctggatacgctcacggttaccctcaacaacttttacgtgtacacgtaaagtgtcaccaggacggaacgcaggaagatcagtgcgaagctgttcttttgtgatatcttgaattagtttttgcatcgttttcaactccttccaacagatgctcttggccacaactgcaaggcacagcggaacatcgttttcaagcttctgaaggataagcctccttaagccacaagtagtatcttatcatatcttcatcgcctgcgcaatagaatctattcgttttcccactcggaaatccattttctttgctcatcagtgagaggatagtttttaagaagatccggacgtcttaaaaaggttcttctgattgattctttattgcgccattcttgtattttggcatggttgcccgacaaaagggtctcaggcacttttaagcctctataatctgcaggcctcgtatagtgcggatgctctaaaagccccgtgctgaaggaatcctccacgtgggatgcttcttttccgaggacgcccggcaaaagcctgacaacgctgtcggcgatcatcatggcagggagctctcccccggtcagcacaaaatccccgatggagatttcatcagtgacaagatgttcccggatccgttcatcatacccttcataatgtccgcaaataaacatgagatgttcctcttgtgccagctcctcggctttcttctgcgtataacgctcaccttgcgggcagacgagaataatgcgcggcttggcgtccgtaccggctgtcagcttttcaaccgcatcaaatacaggctgcggctttaacaccatcccggctcccccgccgtacgggtaatcatcaaccgtttggtgtttattatccgaaaaagcccggaaattgatgacgtcaaaacggacagcctctttttcctgtgctttttgcagaatggaggagccgagcaccccttgaaacatttcgggaaacagtgttaaaaagtcgattttcattcgtctattaacccttccattacatgaatcttaattttcttctcatttatattaatatcctttaccacagaagcaatatacggaatgagcgcatcttttttgccttttcttgcaaccacccatacgtcattagccccgggcgtcaagatttccttcactgtgccgatcagttccccgtcttctgacacaacctcgcagccgatgatttcatgaaaataaaattcatcttcttcaagctctcccaagtcttcttcagggactttgatcaccatgtttcttaggtgttcgacttcattgagactcggcatttctttgaattgcagcaggtgaaactgcttgtgaagcctgtgggcgcttaccgttactttgattggctccgcagccccttccgcaaacaaatagagcgtattgccgggcttgtaccgttcttcggcaaagtccgttttagaaatgacccgcacttcgcctttaatgccgtgggtatttacaattttgcctacattaaaccatctgtttgtcatattatcacctcgggcggatttcaattactaccccgtcttttatgacgatggtatttgccgctgttttttcatgccagttatcaccgacattgattgaaagcagcgcatcgatctccttttccttcacttcgcttccaagcgggagcgactctgtctggcttatttggaaatcgatcattttgattttgtcttgtcttttctcaatggcttttttaaaagattccgctacatcgggattctgctgatctttttcatgttttctaagctgaaaatagagctggctgcattctcgttcaagcgtttgctttttttctgcaaaagaggccaaaagctcttccttgctttgctcggtcagaacctgcataacggttaccctgtgaataatctgcataggaccagactccccactcttccaacatatttctgttcatttgccttttttacgtgtaaaaaaaggggaggtgccggccctctccctttttcagtcaaatatttcaaattgaactttcttagaagactgtgcgccagctgcaaaaacgacggttcgaatcgctcttgcagtccggccttgctttccgataatcttaccggtatctgacttattgacagataagcgcagcgcaatcttttgatcagtctcttcctttgtgaccgttatgtcttccggatggtcgacaagcggagccacaatgctgacaatcaaatcttccaagttctgatcagtcattacttgccttgtttagcgttgtggaatttttccataattccttggcttgagaacaagttgcggactgtatcagaaggtttagctcctgtttgaagccatttaagagcaagctcttcgttgattttcacttcagccggctttgcaaccgggttgtatgtgccgactgtttcgatgaaacggccgtcacgcggtgaacgagaatctgctacaacaatacgatagaaaggagatttttttgctcccatacgttttaaacgaatttttactgccattttactagcacctccgaaaatatttcaacaagatagtatattaacaatgataaaagtgtttgtaaagtgttttttcttaacaacggttttatcatgtataaccgattacataaaaggtaatttaaagccttttttcttcccttttgacatgttggtcatctgcttcatcatttttttcatttcctcaaactgctttaaaagacggttgacttcctgaacggatgttccgcttcctttggcaatccgcttccgccggctggcgttaataatatccggctgttctttttcaagaacagtcattgatttaatgatcgcttccacatgattcagctgtttttcatcgacttggatgttttttaagcctttcattttgcctgcgccgggcatcatttgcagcagttcgtcaagaggacccatgtttcggacctggccgagctgctccagaaaatcatccaatgtgaagctcatcgttctcattttctgctcaagctctttggctttgtcttcatcaacggtcgcctgagctttttcaatcaaggtcagcacgtcacccattccgagaatccgggatgccatccgttcaggatggaacgcttcaagagcatcgagcttttctcccattccggcgaatttaatcggcgtttcggtgaccgcgcggatagaaagcgccgcacctccgcgggtatccccgtcaagctttgttaaaatgacgcccgttaaaccgagctggtcattaaagcttttggcgacgtttaccgcatcctgaccggtcattgagtcgacgacaaggaaaatttcctcaggatttgcgacttcctttacgccggagagctcatccatcagttcatgatcgatgtgcagccgtccggcggtatctaaaatcacataatcatgatgctcttccttcgctttttcaatcgcctgtctggcgatttccaccgggctgacctgatcgccaagcgaaaagaccggcatatcaagctgtttccccagtgtttccagctgtttaatcgcggcgggtcggtaaatatccgcagccacgagcaacggtttgcggttatgttttttgcgcagcaggttggcaagcttccccgtggttgtcgttttaccggcaccttggagcccgaccatcataataacggtcggcgggcgtttggcgacggcaattttgctttcttcgccgcccatcagctcggtaagctcttcttttacgactttaataacctgctgaccgggtgtcagactctgcataacgtcctgtccgacagcccgttcacttacttttttcacaaaatcctttacgactttaaagttaacgtcagcctcaagaagcgcaagacgaacttcacgcatcatctcttttacgtcttgttcgctgacttttccttttccgcggatttttgaaatcgtcttttgcagtcggtcggctaatccttcaaatgccattgtttgccgcctcctaatctaatttctcaagcgcttcaatcagagccgtcattttttcctcttcctgcaacccggaagcaagctctttcagctttgtaaacatttctttacgctcctgaaactttttaaaaaggagcagtttttcttcatattgttcaagcatcgcttcagtccgtttgatgttatcgtaaacggcttgccttgaaacgtcatactcttcggctatttcaccaagggagaaatcgtccagataataaagcgacatatagctcttttgttttgacgtcagcaacgactgatagaagtcaaataaatagttcattctcgtcgttttttcgagcgacatttgagctctcccctttgttaagtcaaatccctttacaaaaacttagtttacatggtttcagagcgtgtgtcaagtttttatcttgtcaaagcaggatgctctttttacataataagtttttttaaaaaaattcatacagaccgtcgttaaaatactcgaattcttgttttgatacacgatagcggcaatagccttcgtaaaaagcattgaggcatgcttcatttgtgacaaaatgactgatcgctaatgattcatcatatcgcggatctcccgccgatattcccgcagcatcgataaacagatagacctctccgtctttcaccagcacattatcagtcgtgcagtcaccgtgaatcattgtctgctgaacaggaacaggcctgtacctgtccaattccttcaaaagctctgcacttccttcagcctgtccttttttgacatattccccggctcgtttgatttgcagatcgagccagtctgattccggctgtaaaccagggaccatttcggtttcatgcagacgttgcagaaaccggccgaaacttttgatcagctttttcttttcagtatccccttttgcttttcttaaagccgaagtcagggtgattccatcctcaaatgacatgatgatatggctggcatgctgttcctgtatcatcccataataaataggaacaggcagacgacgagtttccgtcagtttttgtaaaacgaaggcttctctcattaaccattcccgatacttctgttgaaaagaacttttcagcagaaatgcgtcttggccggtcactatttttcgaacggttgaagtgcctccctgttcatccaacagcgacatatggtttatcgcgccgatcttactttccaattcagctttcagccatttgtccaacaattgccccctccattccgatctatcaatgcgtataaaaaaacgagtataaaaccgtccattttatactcgttttttattcattaatcctcggctttttcaactaaatcagaaaagagaccgtatacgtaagattctgcatcaaaccgctggagatcgtcaaccttttctccgaggccgaccagtttcacggggatgtgaagctcattgcggatcgccaggacgataccgccttttgcggtgccgtcaagcttcgttaacgcgatacccgtcacattcgtcgctttggagaattctttcgcctgcgccatcgcattttggcctgtcgtcgcgtccagcgcaaggagaacctcatgcggagcctcaggcacttcgcgttcgatgacgcgtttgactttttcaagctctttcattaagtttactttattctgaaggcggccggccgtatcacaaatcagcacatccgctcctcttgctttagccgcgtgtacggcatcataaataaccgcagcagggtcgcttccggcagcctgtttaatgacaggcacgcctgtacgctccccccacacttcaagctgttcaatcgccccggctctgaaggtgtctccggcagcgagcacaacggatttgccttcattcttcagcttatgggcaagttttccgatcgttgtcgtttttccgacgccgtttaccccgacaagcagaataacgttcaggcgcccatcctgaatatttaattcagaaatctgttcgtcgccgctgttataaatgtcgacaagcttttcagaaatgacggactgcacttcctgaggatcctggatgtttttcagcttcacttcttttttgagctcatcaatcagctccataacggttgtaaaacctacgtcagcgccaatcagcacttcctcaagctcctcgaagaaatcctcgtcgactttccggtagcgggagacgagttcgttcactttatttgagaaggaatttcttgttttttcaagaccatctttaaatttttcagagacggagtctgtctgtttcgtgattttctcttttaattttttaaaaaagctcatctttcaacctctttcctcgttactgaacgaattcttttgtttcttccagtttgaccgaaaccattcgggaaacgccggattcctgcatcgtaacaccgtagaggacatccgcttcttccatggtgccttttctgtgggtgatgacgataaactggctgtcgccgctgtatttttttaaatattgcgcaaacctgaatacattggcttcatcaagcgcagcttccacttcatcaaggacgcagaacggcacgggccttactttcagaatggagaataaaagggcaatggcagtcagcgcccgttctccccctgacaaaagatttaagttttgcagttttttgcccggaggctgcgcgataatgtccaccccggaattaagaagatcattcggatcagtcagcttcagttcagcccgtcctcctccgaataaagaacggaacacgtcgttgaattgagaacggatctggataaacgtttcatggaatcgcttcgtcatttcagaatccatttcttcaatgacttgaaacagtgtgtttttcgcttccgtcaggtcatttttctgctctgttaaaaactgataccgttcgtttactctttcaaattcatcgatgctgccgagattgaccgttccgagctcttcaattgaaagcttgatcagtttgacccgttttctcgcctcttcaggctcgagttcgagctgatattgttcttttgctccttcaaaggataagctgtactcctcgcgtaaatactgcaagagattatcaagctcaacttccatccggccgagttttacctcttcatctttcagaatgtctgttttttgcttatacagacgcttcatctctttcagttcaagctcgttcgtatcaagagcccgctggagcttcacacgctggtcgcgccggctggcgatcaattcgatcgttctcgttttatcgtgaagcttgtgatgggctgcttcttcaagctgctcctcaccgcttgtgctggacgtcatctctgaggtcaggaggcttaaatcttcccgtgtttctttcagagcgagctgcgtttcttcaagctcttttttcagccgtttgaggttgtcttcttcactcgaacaagcctgttcttttttcgcagcagccactttacattccgtcagttcatgagagagcgtttcttttgttgaggatagggtctgcttttgttttgtcagcctttccatctcttcctcaagctctttcagctggccggatgcctcactcagctgttcttccagagctgatttgcgcgtctctttttcccggctgctttccgtcagtgatgctttctcctgatcgtaaagctccagatgggtattgatgttcttttcagcgacttcgagttcatacagcctgccttttacatcctgctgctttgttctgtaagattcaccgtcttcacggagaccgctcagcgtatgttcaagctcttgaatggcctgcttaagcgttttgacctctttttcgagcagagctgttttttcttccatttcggcaagccgcgcagtcaccgtctcaagctcacgacttctgccgagcagagaattgtttttctttttgaccgcgccgcctgtcattgatccgcctggattgacgacatcaccctcaagcgtcacgatgcggtagcggtgcccgagaagcttggccagttcattcgcgccttttaaatcttcagtgatcagcacggtgccgagaaggttttgaatgacattccgatacgcggcatcatatgtgacaagcccgctcgctgtgccgaggaaagacggatgcttctgagccgtctgttcatcacgggtttggagctggcgcggtttcataaccgtaagcggcaggaacgtcgcgcggccgaaggaattctgttttaaatattgaatcgctttccgcgccgcctgctcatcgtctgtgacaacgtgctgcgccgctgcgccgagtgcaatctcgatcgccgtttcatatttttgttcggtggcaatcagttcgagaacggcgccgcggatgccgccgagctgctctttctgcttcagcacttcttttacgccttggtaaaatcctgaaaaatcgccttgcatcgtttcaagcatatcttttttggatctggcctgctggacgaattgatatgcctgatacagcgctgattctttcttttcatattggcgttttttctgttcatatgctgtctggacttcgcgaaagcggacgacctgattgtgaatatcctcttcaacggcagccaattcttcttcgcacgccgctttgcggactgcaatatcgttacgttcttcaagatatttttcattgtttgctgtcagtctcgcctgctggaccgcggattgggacatctggtcatctaaaagctgcagctcgttgcgaatcgacgcctggctgtttaacaattcaaagtaatcgctttttaattgttcaattttctcatctacattttcattatgcagactgagagcctgctgcttttctttcacttgggcgtttaaccgcttcacttccgcacgaagtttatcatagacggcagactgttttgcaatgtccgctttcagttcggcttctttgttcgtgtaatgtgtaacggattcctcaagctgttcccggttttgcgcggcgttttttttacgctctttcagcacttctttccggccttccagcttttccagctcttcacttgtcacgagcagaacctgctgcagctcgttgacggattcatcaagcgcgtggattttatctctcgtctcttctatcatcgcttcttttgcggatagagccgatgattccgccaattcttcttctttagcagcctgcaccttgtcttttaaacccgaccatctgccatgcagttgttcgatgtcaaaggcggtaagggcaatttcgacatgctcaagctctttctttttttctaagtagtctttggcgattgatgcttggattttcagcggttcgacctgatcttcaagctcgtggagaatatcttccaccctgtttaagttatcctgcgtctcaaacagtttgttttccgcttttttctttcttgttttatatttcagcacgccggccgcttcttcaaaaatactgcggcggtcttccgctttgctgctgagaatctcttcgactttcccctggctgataatagagaatgcttcttttccgagcccggagtccataaataagtcaatgatgtctttcaaacggcactgctgattgttgatgagaaattcactctctccggagcggtacacccgtctcgtcacgctgacttcgtggtaatcgatcgggagaaaatgatcttcattatcaagcgttaacgtgacttcggcaaggttcagccgcttgcgcgaatcacttcccgcaaaaatgatatcttccatttttccgccccgaagcgagcgggctgattgttcgccgagcacccagcggatggcttcggtaatgttgctctttccgctgccgttcggaccgacaacggccgtgacgccttttacaaagtcaacggatatccgttctgcaaatgatttaaatcctataacgtctaaacgtttgaggaacatcccagatcctccttatcgtataagtatctcaatattatcataatcacccgcttatatcaggcgcagacatactgaaatccccctagggatacagggggattttattgtttcgtatgatgtttttgcaattttgcaagagcttcctgtgccgcatgctgctcggcttcttttttggaacgtccgttcccgataccgagcgcctcacctttaagagagactagcgcctcgaattcccggttgtgggcaggccctttttcattgagaattttgtactcaagcgatccttttccgtcccgctgtacaaattcttgaagctggcttttgaaatccatcacatgagaaaaagcaccatcgtttattttagggaacacgtacactttcaggaattgctgaaccgggtcaaggccctgatccagatacagtgcgccgataaacgcttcaaacacatccgctaaaagcgcaggacgctttctgccgcccgtcatttcttctccttttcccaagagaacaagatcgccgaatgacaattcatgggcaagtgagacgagtgacggctcgcatacgatagcggctctcagcttcgtcaaatctccttcactcatggccgggtatttggcaaataagaattgggagatcgtcagttccaaaacagcgtcacctaaaaattcaagcctttcattgtcttcatacggctttttccgatgctcattcacataagatgaatgtgtaaatgcttgatacaaaagtttctcgttttgaaaatgaaccgaaatccgttcttggaactctttaaattgctctatttttttatagaacttttttttatctttaaaatgtgagtgttttgacatagtaacctccataggcacatcaggttcaccgcgctccccgccgtaaacggaatcggcagcgcgtacagcgtcagacgccggtaaccgaacgattaaagggctaaagccccgctgtcaggcgggacttttagcatcagcttattgctggttttgtatgtagttcacagcgtcgccgactgttgcaatcttttcagcatcttcgtcagaaatctccatatcaaactcgtcttcaagttccataacaagctcaactacatctagggaatcagcacctaagtcttccttgaaagaagcttcaagtttgacgtcagcttcatcaacgccaaggcggtctacgatgattttcgttacacgctctaatgtatctgccatagcaattcacctcccctcaagtattatagaggattcgtttttaaaaaactagagaaactaggatgaaattttaaaaacaaatctttacatcaccattccgccgtcaatatgaagggtttggcccgtcatataacgcgatccttcagaagcaaggaacgtaacaacgctgctgatatcggaaggatcaccgaaacgcgcgagcggaatctgcttcagcatttcatcttggacttctttagaaagcttgtccgtcatatctgtggaaataaagcccggagcaatggcattgaccgtaatatttcggctcgcaagctctttggctgatgacttcgttaagccgattacaccggcttttgccgccacatagttcgcctggccggggtttccgctgacgccgacgattgatgatacgttgataatccggccggagcgctgtttcatcatctgtcttgtcacggctttcgtgcagttgaatacaccttttaagttaatgttaatgacgtcatcccattcattttctttcattctcatcagaagattgtcttttgtgatccccgcattgttcacgagaatgtcgattgaagaaaatgcagcgacagcctctttcatcatgttttgtacttcttcggaatttgatacatcggcttttaccgcgatcgcgtttcggcccaaagatttgatttcatctacgacttcgttcgctttcgcttcattcccggagtagttgactactacgttacagccgtttttcgcaagatcaagcgcgatcgcccgcccgattccgcgggacgctcccgttaccactgctgttttttcattaagcatcctgattctcctccttcagcgtttgaatcgccagttcgatggtttcatggtcagaaaccgcgattgttttaaggcggcggttcacttttttcacaaggcctgaaagcacttttcccggcccgatttcaacaaacgtcgtgacaccttcgtcaatcagtttgttaatggtttcttcaaagcgaacaggtgaatacagctgttcgatcagttttttcttgatatcgtctttttctgtcataacgtcagccgaaacgtttgaaatcacgggaacagccgcattttttaactcacaggcgctgagcacctcctcgagtttttgcgctgccggcttcattaattcagaatggaacggtccgcttacttctaatgggattgcccgttttgctccgttgtttttcgcttcttctgaagccagctccacgccttttgccgttccggaaatgacgatctggccggggcagttcaagtttgcaagctgtacgagatgaccgttttccgtcacttgatccgttacctttttcaaggactccgcatccatgccgagaatagcggccatggcgccttctccggccggcacggcttcattcatgaattctccccgttttcttaccgtgtaaacggcatccttaaatgtcatcgctcccgccgcaacaagcgccgaatattctccgaggctgtggccggcggtgaaatcaggcgtgatgccggattctttaaacttttccaatacggcgatgctcgttgtcaacagcgcaggctgcgcattgtatgtaagggttaattcttcggcgtcgccttcaaaaatgagcgagctcagctttgtttcaagcgtttcatccgcttcatcaaaaatacgttttgacgcttcttcgcgttcgtacaggtcttttcccataccgatatattgtgatccctgtccgggaaataaaaatgcaatcttactcatgatgcggtaacctccagactactcatctgttttttcttcttttacttcttcttctataaatgcggccacgttttggctgaccatttctctcgcctggcgcagcgcatggtaaacagcgcgtgcgtcagaagagccatgcgctttaacgacgggcgctttcaaaccgaaaagactcgccccgccgtactcagaatagtccattttcagtttcatttccatcagcttcggcttcagcactcccgctgcgagcttagaaacaaaacttgaagtcagtgtatctttcagcattttgaaaatcgataacgctgaaccttccaatgttttcaacgtgacgttgcccgtaaagccgtctgtgacaatgacgtcagcagcgccttcgagcaagtctctcgcctcaacgtttccgacaaaattcacgtttgtttcttttaataattcaaacgtcttttttgtcaggtcgtttcctttcttttcttccgtgccgacatttaacaatccgacgcggggcgagctgataccgagaacctgccgggcatatacagatcccataattccgtactggacgagatgctccggtttggcatcgacattggctcccacgtccaaaagaaggaaaccctcgcctgaaacggtcggaagcgtcggcgcaagcgcaggccggtcgattcctttaattctgccgacgataaacagtcccgctgtcatgagtgcgcccgtattccccgctgagatgcaggcgtccgctctgttttcagccacttcctgcgccatcagcaccatagaagagtttttctttctgcgtacggcgcggaccggttcatccgtcggttcaatcacttcatcggcgtgcaacacagtgatgcggtctgatgttgttggcaagtgtgattctatcgttgtcttgtcaccgaccagcgtaatatgaagatcgtcaaatgcctcaatactcttcattactccgtcaataacagctttgggtgcgttgtcgccccccattgcatctacagctattctcatgcatgctccacctttatgattgttttgaacggtacatgtcaaagctgccggagaacacgacttcttctcccacatagctgttgacttcaactaccgttctgcctttttctttttcgactgccgtcactttggctttcgcaacgacgcgctcgccttctttcacctgtcttgtaaagcggatatttgcgcttgcggtcagcgccagctcatcatcaatgacggctacggcgagtgagttcgcctgcgcaaataaatgatgcccccgcgcaatttgattgcggctgaagacatgctcgcgtcttacttctaatatggaaatggcctggccgtcaagctccagatcaataatttcaccgatcacttcgtctaaagacagtgatttcacttcatcatcaagcgtttgttctgccacgtttttaattctttccctcagctccggtattgagagctctaagcggtctaaacggatcgtctgaatgctgacgccgaatttccccgctaattcttcatctgtgatgaagggtgtcgatttgatcgtctgctgcaataatttttggcgttctttcttgcttcttctcatctgtaaacaccatccggacaattaagactaggtactaatagtagtatataatctcatagattggaatgcaatgattgttttttgaaagccgccgaattttgcagaatcagcttaatttctccccttccaggacgccgcttgaaagtaattgaccgcgcagcatgcggtattcgtcatctttccaaaacgcctctgaagacaccagattggccgcatcctggcgggccgtttccaaagctctgtagtcatgaaccatatccgccaccttgaactcgggcataccgctctgtttttttccgaagaaatcaccggggccgcgcagttcaaggtccttttcagacagctcgaagccgtcgtttgtctccgacatgattctcatccgttccttcccggtttcggatttcggatctgccatcaagatgcagaaagattggtggtctccccgcccgacccggccgcggagctgatggagctgagataacccgaaacggtcggcgtcatagatgaccataatcgtcgcattcggcacgttcaccccgacttctacgacggttgttgacacaagtacctgacattgattggcgctgaattctctcatcacctgatctttttcatcagaatggagcttcccgtgcatcaggccgacattccatttaccgcggtaaacgtcagacagcatgttatatacgtcaatcgcattctgtacatccagtttatccgactcttcaatgagcgggcagataatataggcttgccttccctgcttcagctctttttctataaaagccaaaatccgctccagcatgtcgtgtttcacccaatacgtttcgatttgttttcgccccgcgggcatttcatctatcacggaaacatccatttctccgaagacggtaatggccagcgttctcggaatcggggtggctgtcataaacagcacatccggatcctgacctttattcttgagttttttgcgctgttcgaccccgaaccggtgctgctcgtccgtaataacaaggctcagcgctttgaattccacttcatcctggattaaagcatgggtccctactaaaatatcaatctctccgagagcaagccgctccaaaagctccctgcgccgctttcctttgacagaactcgtcaaaagcgcgatatttacatcttcatttgcaaacaacgatacgagagaatctgcatgctgttcggccagaatttcagtcggcaccattaatgccccctgataccccgacaaaatcgcagcgtacaaagcgatggcggcgacggccgttttccctgaaccgacatcaccttgcagcagacggttcattcggtaaggggatgtcatatcagcggtaatttcccgaagcacacgcgtctgtgcggttgtgagcgaaaacggcaggctgtctgtgaaagcggcgagcttttcagccggaaacacatggctgatgccttttgactgttccctttccgctttacggaacgcctgcattttcagctgaaataataagaattcttcgtaaacaaaccggcgtcttgcctgctgtaacgattccctcgtttcaggctgatgcatcgtctgcagggcatgtttgtagtcaggaagcttgtagcggattctcaatttttcaggaagcggatcagccgcactgtccaaatgatgctgcagcgcttccttaataaaccgtctcatcatttttacggtgacgttttctttaacggaataaacaggctcaatgcttttatcttcttgatgaggaccgttttttaattcctgcacggaaacggtctgtctgtgtttatcccatttcccggatatcgtgacgacagaacctaacgtcagtttcttttttaagtagggacggttaaagcagaccgcggtaattaaataattgccgacaagcaccctgaatgtcagcctgtttcgttttttgccgtaataggtaagagaaggttctgaatgaaccttcccttctaccgtcactctttcttcatgttttacttcttctaaatccctcagctcatagtcgtcataacggtaagggaaataattcagaagatcagaaatgtcatagataccaagttcgtgcaatgttttttctgtttccggcccaatgcccttaatatccgctatactagtttgctgatggtgtgtcacttgatttcagcgctcctccgaaaatttttttctctaattctcttcccgtcggtgtcgcggctaaaccgccttgtcccgtttcacgcagtgctgtcggcattgtctggccgattttgtacatcgcgtcaattacctcatcgcaaggaatgcggcttgtaatcccggccagcgccatatccgccgcgatcattgcgttggatgctcccattgcgtttcgtttgacacacggcacttctaccaatccggcgaccgggtcacatacgagaccgagcatatttttcagtgtaatcgccattgcttccgctgattgctgaggcgttccgcccgccatttccacaatcgcagccgctgccatgcctgatgctgacccgacttccgcctgacagcctcctgccgctcctgaaatactcgcattgtttgctacgacaaaaccgaacgcgccggctgtaaacagaaaacggatcatttgttctgttgtagggttcagcttatgctttacggcgaataacgttcccggcacaaccccggcagagccggcggtcggtgtagcgcagatcgttcccatcgccgcatttacttcatttgtcgccacagctttagaaacggcgtctaaaatcagatttcccgacaggcttcttcccgattggatgtatgcctgaagtttcacggcatctccgcctgttaaaccggtctgactcgtgacgcccttcagccctttttcaacagctgcttccatgacggagagattgcgctccattccttgaaagatttcttcccgcgttttttgcgtcacttccatctcttgcgtgatcatcacttccgaaatcggaatttgtttttcttgagtgatttctattaattcttttacattacgaaacatgtcattttcctcctgactttttagtcagctatcttagtaacctgtataatattaggaagtgttgaaagctcgtcaagcacttcttcttcaatattctgatcgacctcaatcgtcatcagcgcaagctggccgacgtccttacgcgccacttccatatgtccgacgttgatggagaatttcgccagcacattggcaacgcctgcaatcgtgccgaatttatcattgtgaacgactaaaatagccggatggtttccggaaagacgcagctcaaagccgttgagctccgtgatttctatttttccgccgccgatggaaataccggtaagggcaagctctccctcatcatcagaaatgacgatacgcgctgtattcggatgaaccggcacggcatcctctgtacggaactctacatatatgcccttctcttccgcaatttgaatcgctgttttaatccgttcatcaaatgtatcaaaatcaagcaggccgccgataatcgcgacatcagtgccgtgacccttatacgtctccgcaaatgatccgtaaaaagacacaatgatccggcggggctcccgcctgaataggcttctggccactctgccgatccgggcggcgcctgcggtatgtgaactggacggaccgatcattaccgggccgataatatcaaaaacgcttctatacttcatgctggtttgttcctccttaacatcacttcattcagcgcttttctttagactaattgaacatttctcaattggcaagcaggcacactgccgcactgccgcaggtaaataaagacataagaatagaagggcctgataagcccttctattctgccgcaaatatatatggatacagaggctgtctgccgttatggatttcaacctcgatatcttcacagacgctagcaatatactcagcgagtttctcagcttcttcttccggcgcgtcctctccgtacaagatggtgacaatttcatcttcttccccgatcatttcatccagcagcaatttcgccgcacttatccgatcttcggcgctgccgataattgaactgtttaaaatgccgataaaatcaccttttttaatatctttgccgtcaatatgggtgtctctgactgaatatgtcacctgtccgcttttcacattccggatggcctcaagcatattggcttcatttacgtcagccggctggtcagggttaaacgcaagcagggcggtcatgccttgagggaccgtttttgccggaatgacaatgacattttcttcagccacgctcgccgcctgattggcagccatcacaatattggaattgttcggaagaatgaaaaccgtctccgcattgacagactgaacggcttcaacaatatcttccgtgctcggattcattgtctgaccgccttcgattacgtgtgaagcgccgatgctcgtaaacaattcagaaatgccctctcccattgccacagtcacgatgccaaaaggcttgcgggcttctttcataacgccggccggctttttttcatcatgttcttggctgatgattgaagtatgctgttccctcatgttttcaattttaattttaatcaaatcgccgtaacgctgtgcgagattgagcacgttccctggttcttcggcatgaatatggactttcgccagcgtatcatcagccacgaccagcagtgaatcgccgaaacggctcagttcgtttctgaacgtctcttccttgaacgtccgtttatcttgatccagcctcaccatcacttccgtacaaaatccgaattcaatgtcttctgtactcagcatgctctgcgcgcttttatgatgctcggcattcaccatatcatcgagtgccggaagaaccgcttttttcggtacggcctctccttttaaagcagccaaaaagccttcatatacacaaagcagaccttttccgccgctgtcaacgacaccgacgtcctttaaaacaggaagcagatccggcgtgcggttgagcgacgcttccgcttcttcaataacggcctccatgaccgaaataatatcggtttcttctttggccgaggcgaccgcttttttagccgcatccttagccacggttaaaatcgttccttcaaccggtttcatgaccgccttatatgccatatccactcccgcttggagtgctgcggcaaattcttgggcgtctatttggtttttgttttcaatgctctttgtgaaacctctgaacaattgggacaagatcacccctgagtttcctctcgctcccataagcaggccttttgacagggcgatgccgactttgccgatgtcgggtgagtcaatgtgctctacctctcttgcaccggatgacatcgataaattcatatttgttccggtatcgccgtcaggcacgggaaacacgttcagcgcatccaccgcggatgcgttttgagacaatgtctcagcccccgccagaatcattgccgcaaaagctctcccatctaagtttcgtctagacaatactcatcctcctcactacgggttcgttactcgtacgccttggacataaatatttacagaatcaactgcaagtccgattgtttgatttactgtgtattttaccttcgtctgaacattgtgggctacttcggatattttagtgccgtagctgacaataatgtacatgtcgatatgtatttgttcggcttcctgacggacatgtacgccttttgcgaagttctctctccggaggatttcagacaaaccgtctttaatctggttttttgaggccatccccactattccgtaacaatcaatggcagcgcctccggcaaccattgcgatgacttcgttggatatatcaatctgtccgtattttgtcttcatttcaatggacacacaggttcctccttcaggtgcatagagttatcattattctactatatgtatcccattatgaaaagaaaagatacagacagcggccttcagcgcggaaatgtgattggttttacatgtcaagtgatttttcttgaaagtaagggaaacaatagttgcaaacggtttttagctgtggtaaattatttaaagtattgtataacgaaagcatctgagacactatgtttgaaaagatgtttcgcgcagttaggagggaaacaaatggcacgtaaatgttttattacaggtaaaaaaacaaaagccggaaacaaccgttctcacgcaatgaacgcttctaagcgtacttggggcgccaaccttcaaaaggtccgcatcctcgttgacggcaaacctaaaaaagtgtatgtatctgcccgggctttaaaatccggtaaagttgagcgtgtataagcaaaaatgaacgcctgcccttttatgcggcaggcgttttttatgcgttcaaagagggcaatttcagcttcttgggcttactcttttctaaatgagcccagcatcgcccggacaattcctcctaaaaacttcggcaatttaatggtataaaatttcattttgtcccctcctataagtcccgtatccgctgcgttcatcactttaggattcatggttttttccgcatatggcagaagccgcttttctaatccgcgctccttaccattattaatatgccttttgcaaacgaaaaagtacctcgtgaatgaatgagttcgttactaatacatagtgttgaacccagaggaatatgacaattttcaaggggatatttaaaaccgtcgagtgtcaggccgtctgccgcttccgtaaacggaatgaaagaaatatagcgtctgcgcgctttttcttcaattgtataacggccgggcccgaacatctgaatgtcattctgccggtcgatcagctcgacatcggtattcttgtgtaaggctttatacagcagctggatgttccctaaaaagtgatcggctcttccgcccgtcacaccgaatatccgaatggtttccggttctttttgtaaagcccagtcaagggcgagttcaagatcggtataatctttttccgcctgatacacatggagggccggcgccgctttttgaatctgcatgagctcctcttccgtaatgctgtcaaaatcaccgaaagcttcctgcggaatgattccggcttccaaaagagcaaccgtccctttatcgactccgacccacgtcgtatctccgtcagtgtattcggatagatcgggaataagctcccgcgggccgcccgcaacgatattgattgtcctcatatgttttcctctcttttagacgcgaaaagagccggcggctttcaccgggctctttttcagcatgtttattacgcgtttcggatgtcagcgatggcttttttccgatccggctgattatatacggcagacccggcaacaagcagattggcgcccgcttcagcgcataaaggggctgtttctttattaacgcctccgtccacttcgattaaaagctcagacaggcctttctcctcagccagctgtttgacctgacggattttcggcagaaccgaatgaatgaagcgctggccgccaaaaccggggttaaccgtcattaacagcacaaggtcaagttcctcgatcacatgttcaatcatttggacgggcgtatgcggattgagcacaactcccgcttttaccccctgctcttttatcaattgaatggtccggtgaagatgcggacacgcttcagcatgaacggaaaggatgtccgcgccggcttttgcgaatgccggtatgtagcggtccgggttttcaatcataagatggacatccagcggcagatcagtcaccggacggacggcttcaacgataagcggcccgattgtaatgttagggacgaaatggccatccatgacatcaatatggatatagtccgcccctcctttttccacgtctttaatttcctcgcccagtgaagcaaaatcggcggaaagaattgatggcgcaaccttaatcatattaatacctcggctttctctcttttatttcctgcataaattctttgtaatgctcatagcggtacggctgaatctctccttcttccaccgcttgctttaccgcgcatttcggctctttaagatgcagacagcctctgaatttgcaagaggcgcttatttctctgatctcagggaacgtgctgcccagctcttcttcctcaatgccggtaaattcaagcgaactgaaccccggagtatccgccaccagaccgcctgatgtatgaatgagctccacatggcgcgtcgtatgttttccgcgtcccaaatgcgcggaaatctcatttgttttcagctcaagctccgggctgatcgcatttaaaagcgaagattttccgactccggactgaccggcaaacaccgtcgttttgttctcgaagtgtttcacaatgcctgttaagccgctgttttcttttgatgacgtcacatatacgtcataaccgatcgcctgatagtcttgcacgtaagaaagtatcgcctctttcgattccccgtctgcagctaagtccattttggttatgcagatgatcgggtgaatgccgttggcttccacaaggacgagaaaacggtccaataaagacgtgctgaacgccggctgaacggcagaaaagacaagaacggcctgatcgacatttgaaattggcggcctgatcagctcgtttgttcgttctttgatttccagcaggtagccttctttatcattttcagcctgataaacggcataatcgccgaccaggggcgttattttattttttctgaaaatgccccggcccctgcattgaatgatcttgtcctgtgattcatccaagacataatagaatccgcttaacgcttttataattttgccctcaggcatagggtccctccttgtcagtcattatctttcgggtattcaatcgttttgtagctgacgactttatgatcgaccatcacttgataataccccttctgtccctgatcaatcttcagttcaattgttttttcagtcggctcttttattttaaaagagtcatacgtatcagagatgctgtggtccttatcatcgatggcgatttgcacttcaagctcgtccccttcatgttcgggttcgtaaggaatgctgattttttcttttaccgttttcgccggtttttcttcaggtccgagcgagaacgtcacttcaacattacttcccggcttaaccgcagtgccggctgccggctcttgcttcatgacttgtccttccggcacgtcatctgaatgggcttgtttttcaacaagctgcaggccgttatcttcaagataccctgaagccgcttctttgctgtaagtctttaagtccctcagcgtaacgtccgccgggccgaggctgaccgttagattgacttcatcgtcgcttgcgaccatatcggtgccggctgaggggttctgatcaattacggtgccggcctcgctgtcatcgttttcttctttgacattgacatgtttgaagcctttttccttcagcgctttttttgcgtcgccgatctgccgccctttcacgtcgatcagctgggttttcggttttccgatgcttttgtacagttttacagaagagccttctttaacggtagaccccgcttttgggtccgttttgaccattaattcctcttctattttttcatcttcaatatccgttatatcaggatccgcccggagcccgttcttttcaagcagggcttccgctttttcgtacttcatgccccgtacgtcggggacgcttacatctttaggcataaacaaagacgggaacacggtgaccgcaagaacagctgccataatgaaaatgaaacagacggccagcaaaacccacggccatttccgttttttctttttggcgggctgctgttccttatcatccgtctcccccggcgtttccgcctgaggcgcggcttttgcgccgtcagtaataacgggaatggcttttgtcatttcctcatcatcctgcacggaaaatttttgttcattcagcctgccggcgtcaaaagccgttctgatgtccgcttccatgtcctcggcgctttcatagcggtgaaacgggtctttagcggttgcctttaaaataatgttttcgacgctctgcggaatggaagggttccactttctggcggaaggcgtttctgtttgcagatgctttagcgctatgctgacggctgattctccgtcaaaaggaattttacctgttaaaagctcaaacagcacgatgccgagcgcgtaaatatctgattttttcgttgccagaccgcctctcgcctgctccggagacaaataatgaaccgagcccagcacagaattcgtatgtgtgattgtcgtagacgtaagcgctgtggcgatgccgaaatccgtcaccttgatatgccctaaatgatctatcaatatattgtgcggtttaatatcccggtgcacgatatggttttgatgggcatgggcgatggccgagacgatctgctccataacggacagcgcttctttcggatgaagcggtccgtgtgcgtttatgtattcctttaatgtcatgccttccacatattccatgacaatgtaataaatatcgccttcctccccgatatcgtaaatactgacgatattcggatgatcgaggcttgatgccgactgtgcttctcttctgaaacgcctgataaaatcaatgtcattcacaaagtcaaaccgcagaattttaattgcgacttcacgttcgagaatgatgtcctcagctaaaaaaacgtttgccattccgccgccgccaatgggccggaggatatgataacgcccgctgatccgcttgccggttagcacttgtcttcaccctcttttgcatctgcggaaaactcaatcaacacagccgtgatgttatcttcgccgccgttttgattcgctttgctgatgagaaggtctactttttcctgaggatcagattcggcttgaagcatttgtttgatttcgtgatcttctattttatttgacagtccgtcagagcataaaagcagctgatcgccgtcagacagttcaaaagaacgggcgtcgggactgatggtttcatctgtccccagcgctctcgtcaatacatttttccgcggatggtgctcggcgtcctctttcgaaatttcccccgtcttgaccagctcattcacaagcgaatggtcctcagtcagctgagtgaattccccctcttgaagcaggtagcaccggctgtcaccgatatgagccacagtgacaaacttcccggtgaataaggcgcaaacaacggtggttcccattccccggcattcttcattcgctttagcgtggtcatgtactttgacattcgcctcatgaatccggtctttcagccaatcctcgcaagcagacggcagagaaggaaccgtttcggtccggttccactgctcttccatcgccgcaaccgccatcctgctcgctacatctccggcaagatgaccgcccatgccgtcggcgacaaccgcaagcaccgcgtcttcttttgtgaaaatgcccgccgcatcttcattatgccggcggactttacctgtatctgttttcaaggctgtaatcaacctcttcacctcgtctcgtcttgacgctccttcgcgcgaagctgaccgcaggccgcgtcaatgtcatggccttgctctcttctgatcgtgacatttacaccgcgggattttaacgttttttcgaatgcgaaaatctgatctctcggtgtgcggacgtaatcccgttcaggcacatagtttaccggaattaaattgacatggcatttcacgtcttttaacagttctgcaagctcttctgcatgttcgacctgatcatttacgccgccgaacagcccgtattcaaagctgatccgtctgcctgttttctcgatgtaatatttgacggcctccataaggtcaggaagcttataggctttgttaatcggcatcagacggcttctgatttccgtattcggagcatgcagagaaatcgcgaaattgatctgcattttttgatcggcgaaatcgtaaatcttcggaatgattccgctggtggaaactgtgatatgacgcgctccgatgttcagccctttatcgtggttaatgattttcaagaaagcgagcatttcgttaaagttatcaaaaggttcaccgattcccatgatcacgactgagctgacgcgttcatccgtttcatcaagcgccttttgcactttcacgacttgagcgacgatttctcccgcttcaagattccgtttcagaccgccgagcgttgacgcgcaaaatgtgcagccgatccggcagccgacctgtgtcgttacacatacagaattaccatactcgtgtctcattaaaaccgtttcgatcgtataaccgtcatgaagctcaaataaaaatttcatcgtgccgtcttgagatgtctgttttacagccgttttcagcgttgtcagcacaaaatggctctcgagtttttcacgcaggctttttgagaggtttgtcatttcatcaaatgaagaaacccgcttttcatagagccattcaaaaatctgtgccgcgcggaacggcttttcgccattgtcggtcagccattgtttgatttcatctaattcaaaagagtaaatggacggctgctcagtccgcagctctttccgtacgcttgtcttttttaattgtgtcattttttatcccttctttctcatgctgctaataaagaaaccgtctgttccgaaataatgcggaagaatttgaaggcttccatcctgaacaaagggtctcgccttttcaggcagccgcttttcaagagacaaatcgggttcaaactcagggtgttcttgtataaacgcatgcataacttcttcattttctgtccggtccattgtacacgtactgtatacgagtgtgccacctttttttactaatggggcgatttcccttaaaatgccgagctggatttctgacagccgtctgctgtcctccggcgtcttcgtatatttcatatcgggttttcttctgatgacgccgaaacctgagcaaggggcatcaacgagaatacggtcaaaccgttctgcgccaaaggcctctcccgctttccgcgcatccatcgtttgtgcgtcgatgatcgtaagtccgagccgttctgcgccctctttaatcagcttcactttatggcggtgaagatcaagcgatgtgaggctcccctcgttctccatcagttccgcaatgtgagccgactttccgcccggtgcggcgcatgcgtctaaaacggtttcgcccggcttcgggtccagcgcccgcgcgacaagcattgagctttcatcctgtatggatacccggccgttttggaaaaatgccgtgttcgcgatgcttccttttaaaagcttaatcgcatcaggagaaaggtctccggcttccgcttccagaccggcattctccatctcattcagcaccgtttccctgtcgctctttatgtgattgacacggagcgtctgcttcggcggaatgagatgaatccggcagatcttttcagccgcctcaaagccgtacgcctcgacccactcttttacgagccattcgggatggcttgtctctgtagaaagacggagaaccgggtcttcaatttcagcgaatgacggcgccccctcacgctgcagggagcggaggatgccgttgacaaaggacgcaatgcccttatgcccgcgttttttggcgatttcaaccgcttcatggatggcggcgcgatccggaattttttctaaatactccatttgatacgcggacagacgaagcagctgaatcacccacggcttcaccttattcggctttcggataaaaggcttcagcataaagtctaaggcgattttattttgcagcgttccgtagacaagctctgtcagcagccctctgtcctgatcgctgagcgtgttcgttttgataaccgatgtaagaagcaggttgctgtatgcctgattttgctcaagcttctcaagcgcttcgagggcgagctcccggacattaattttcttcatttgcttctcctaacacgtcaccgggctgcacatttttgcctcttacaaaatcttcgcccttcatccgtttttttcccgccggctgcagctcagtgattaaaagggctgtgctgtttcctgatgcgacgacaatgccgttttgctccgtgcggatgactgttccgggcgcagcttcagtttttgccgcaactttttcagaagcccatactttaatagtttgaccgttcaaagttgtataggcgacaggccaagggtttaaacctctgatctggttgtaaatctcttctccgggctttgcccaatcaatccgctcctgctcacgcttaatgttaggcgcgtaagtcgcttttgattcgtcctgtttgatcggtttaatattcccggaaatgacgttcggaacggtctctgacaaaagctttgcccccgctatgcttaatttgtcgtgaagcgtgccgacgttatccgtttcatcaatttccacttcgattttagaaatcatatcgcccgcatcaagcttttcaaccatatacatgatcgtcacgcccgttttcttcttgccttggagaatcgaataatgtatcggcgctccgcctcttaattcaggcaatagtgacgcgtgtacgttgatacagccgtatttcgggccgtccagcagctgcttggggaggatctgtccgaatgccgccgtaacaatcaggtccggcttcaggctgagcactttttctatttcttcttcgagccttactttttcgggctgaagcacgggaatgccgtgacgttcagcttcagcctttacaggagggggcgtcatgattttttttctgcctttcgggcggtcaggctgcgtaacgacaccaaccacttcatatccgtcttcaataagcgtgcgcaggacgggaactgaaaagtcgggcgttcccataaaaacgatccttgtcatccaatcatccttccatttctgccagttcttcttcagtgtagtaagccgtaatttttgatgtgaataaaatgccgtctaaatgatccatttcatgctgaacggctctggccaaaaaaccctccgcttctaaaataaacggttttcctttacggtcataggcttttacctttacgtaatccgggcgggtgacatcgccgtaaaccccgggaaagcttaagcagccctcgactccggtctgttcaccgctcttttcaagaataaccggatttacaaggtcgatccggccgctttcttcaccgatgtccacgacggccgctctttttaaaatgccgatttgcggcgcggcgaggccgacgccatccatttcgagcatcgtatcgtacatatcatcaagcagtttttttaattttttatcaaacactgtcacttcttcggcaggtgtttccagaacctccgccgggtgtgtgacgattttttttacagccaaaattttgccctccaaaaactaatgttacatcagcatgtacggattcatatcgattgaaatcattacatgcttttgcgcaatgtcgcgtttatagtgctccagtatctttttcaactgaatctgcaactcgttttcctgtctgtattttatcacgcattgatagcgatatctatctttgatcctggcgatcggggaagccgccggcccgagaattttcgtatcaggcccgcatcccgctcttaaatagtttgtaatcttttctgcggtgaccgcggcttttgccgcttcttcatgagaaacggtcaccagcgccacgtaataataaggcgggtatgactgggcccgtctgtgcgccatttcctgctgaaaaaaagtttcatagtcgtgcgttttcgtcagctgaatgctgtaatgagacggtgtatacgtttgaatgaccaccgttcccggcttttcatgccgcccggcccgtccgcttacctgcgtcagcagctggaatgtcttctccgcagccctgaaatcagggatgtgaagcgtcgtatctgcgcttaatactccgacgagcgtcacgttcggaaaatcaagcccttttgcgatcatttgcgtaccgagcaggatatccgccttcccttcaccgaacgctgacaacagtttttcatgggcgccttttcttgaagtggtgtccacatccatcctgatcacgcgcgcctgaggcagcactttggtaagctcctcctccacacgctgcgtgcctgtgccgaaaaagcggatatgttcgctgccgcattccgggcatgttcccgggacaggttcctcatggccgcagtaatggcatttcagcctttgtccgtagcggtgataagtcattgaaatgtcgcaatgcggacattgcggcacataaccgcagtcccggcacatcacaaacgaggaatacccccgtttattcaggaaaaggacagcctgctctttttttgcaagcttctcttccagctgttccatcagctctcttgaaaacattgatctgttgccgtttctcagttcttctctcatatcaacgagagaaacgtcaggcatgagctggcgatttacgcgatgttttaacggtagcagctcataaacgccttttttcgcccgcgcaaatgattccaatgtcggcgtggcgctcccgaggacgaccggacagctgtgatgctcggcccggcggatggctacgtcctttgcatgataccgcggcatttcctcctgcttataggaagattcgtgctcttcatcaataatgatcatgccgagattttcaaacggggcaaagatggccgatctggctccgacaacaagccggacttccttgcgctgaatcttccgccattcatcgtatttttcacctgtggataatccgctgtgcatgaccgcaacctgtgagccgaagcggcctttaaaacggttgaccatttgcggtgtcaacgagatttccggaacgagcacgatggcttcttgtccttttgccagcactttttcaatggattgcaggtaaatttccgttttgccgcttccagtgacgccgtgaagcagaaagacgtgatggacatggtcggctacggcttgtttaatcggctcaaaagcagcccgctgctcttctgtaagagagagcggctctgtttttttgaacattctgtcctgatagggatcgcggtaaacctcctcaaagctttccgtaagaagcccctttttaagaagcgttttcagcgtcgcggaactggaatcggtctttttgcaaagctcggccgcggaaatctttgctcccccgccgataaaataagtaagcacggcgagctgtttagaagcctgctttgtcaatgaatctgcgtgccgggcgagttcttctttgtctgcccccgcttcgatcatgcggatcatttttttattcgttttttgggcgactttatatgtgacatcaatgcttcctttgcgcacgaatttttgaagtgacgaaagaatgctttcatcggtaatatccgagtacagaagacttttttgattcctgaaaagctgtttgatgtccggtgtcagcgcttcttcgtcaacgactttcagctctttctcgtacttcgccttcagtgcggcgggcagcattgcctgaagcgccgtaattttaaacgacagcgttttgtcagaaagccatgaagacagctgcatcagttcctcagtcagaacgggcgtcaaatcaagaagcttctcgacttccttcattgagccgccgtttaattcagacgaatctttcaaaccggtcacaaatccttgaagcttgcgcgggccaaacgggacaatcacccgcatgccgacttcgatcatcccttttaaatgatcgggaattttgtaatcaaagggtctgtcaatgtttttggagctgacatcgacaatgacttctgctacattcatacgggttttcggtcctcggctttcaaagcggtcatttccttcagcatttcaaaggaaacgtcaagtttagacataagcgcaagctcccgttttcttccgtcccggaaatagaaggtgacgacattcgtatccgtgccaaatccggctccttctgctttcacatcattcgcaacgatcatatcaaggtttttctgttcgagttttctgcgcgcatagcgttcgacgtcttgcgtttcagccgcaaatccgaccagcagctggtgtgttttccgttcgccaagttctttcagtatgtctgccgtacggttgaattcgatcacgagcgaaccgtctttcttcttcattttgtgatcagaaacagccgccggcgtaaaatcggccacggccgccgtcttaatcaccatgtcgcatgaatcaaacacagaaagcacggcttctctcatatcagctgccgattgcacaggaagaaactggtacagcccgactggcggctctattgacaccgggcctgaaatcagcgtcacccgcgccccgagacggacggcggcttcagcagcggcgtagcccattttgccggtggatttatttgtgaagaagcggacagggtccacggcttcgcgcgtcggaccggccgtaatgacaatatgttttcctttcagcggcgcatcgtctccaggctccttaaaatgctctctgacacgctcaacaataagctccggctcctccagccttcctttgccgacatatccgcatgccaaatagccttcactcggctcgataaagcggaccccgtcctgataaagcacagagatgttccgtttcaccgccggatgatcatacatatggacattcatcgcaggcgccacccagaccggggcctcagccgccagcaccgtcgttgtgagcatatcgtcagcaattccgttggcaagctttccgatgatatttgccgtagcgggcgcgacaataattaaatccgcccagtcagcggcatcaatatgagaaatcaccttcggattttgttcattaaatgtatctgtatatacttcattccggctcagcgcctgaaatgtcagcggagaaacaaactcacgcgcggactcagtcataatcactttgacgtttgcgccggcctgaaccagcttgctcgtgagtgcggaagctttataaacggcaattcctccgcttacgcatagcaaaatgtttcggtttttcatgaagtcttctcccctttatgaaagcattggacaaatcccaaacggaaaaaaataacaacctatgtagagataggttgctacgtgtgcttgttattcgctgtcttctctttcaaacgaaagcaggcccgcgtcaatttcttctaaagctttgcctacatatttgtgagaaatggtatgttcaatctgctggtcttttttgatctgcatttcacgcgcgcgtcttgcagacacggtcaccagcgtatatttagaatctaatttattcattaaagagtcaattgacggatctaacataagttattctacctccagcattttcttatatctcggagcgacgcgttcacgttttaagtgctcggcgagaacgattgcgttaatcttatcacaagccgtttggatatcgtcgttttcaacgacataatcatacgcgtccatcatttcgatttcagcttttgcggcattcattctgttttcgattaaatcgtcggtttcagttcctcttgtcacgattctgttttttagctcagaaagactcggcggcgctaagaagataaacaggccttccggaaatgcattccgcacttggagcgcgccctgcacttcaatctctaagaagacgtcttttccttcttgaagcgtctgttcgacataatcaacgggcgttccgtaatagttgccgacatattctgcccactcaagcagtttgttgttttcaatcatgcgttcgaattcatctctggatttaaagaaataatcgacgccatcgacttcgccctctctcgggtttctcgtcgtgactgaaattgagtattcaaatttcgtgtcctgttgtgaaaatattgcttgccgaaccgttccttttccaactccggagggacctgagagaacgattaataaccctctttctttcatgcggcaattacccctgcccttcatccataatttcttctttcacagaaagtctgtgtgcaactgtctcaggctggacggcagataagataatgtgatcactatccatgacgacaactgcacgggttcttcgtccgtatgtagcgtctattagcattccgcggtctcttgcatcctggatcattcgctttattggcgcagactccgggctgacaatcgaaatcatccgattggcggagatgatattgccaaatccgatattaatcagtttaatcgtcatcttctacgttccccctgtaaaatagacgtctctagtgtaacctgaagaggccgtctgtaaacaatacgcacagtcgctattctatattttgcacttgttccttcaatttttcaatagaacttttcatttcaacgacaagctttgtgatttgatgatcattggcttttgagccgatcgtgttcgcttctcggttaagctcctgaacaaggaaatcaagtttgcggccgactgccccgccttcttttaatatatcacggaattgaacaaaatggctcttcaacctggtaatttcttccgttatatcagaacgatcggcgaaaatggcgcattccgtgatcagccggctttcgtcgagcgcatcctccgtccattccttcattcgggcgtaaagacgctcgcgatattgaataacaacggccgaagcgcgctcttttacctgttcggacagcgtctcaagccgctcaatgtgcagaaagcagtcttccgccaaaagccgtccttctttttccctcatgtcacaaagttcctttacagccagctcagcggcttccctgatgacttcttcaagcttgtcatcacgcatctgttcttcgtgtatctgcgcaatatgttcaaatttaaagaaatccattgcatcgggttctgcggccaggctgtagcgctctttcatgacgcgtgcggcgctcacatattcatcaaggagctcccaatcgatgttcaggcttctttttatgagctcgtcactgtttacagtgagaaacagctctactcttccgcgctgtatatgctgcaatatcgtttgtttcagcttatcctctacatatagcaaaggccgtggcaggcgggcgttcacttctttgaaccggtaattgacggatttcaattcaacggttgccgagagatcgccttttgtgctgcttgcgctgccgaagcctgtcatactccgtatcatatgaaacacccaattctttcccgttatcaaaataaaagggcaatagacatgctattacccctaagattatatcatatggaattatttttttcttgtcaaaagtgaacccgccagcaaaaaagtaggtatgcccgacataccgataatcagcatccaatcgcccggcgtaatcggcactgttttgaaaatcggctgcagcggcggataatagatgacgatgaccatcaggaagatagaagaaatgatggccccgagcagatagatattttcaaacggattccgggagaaaacagacgtttcgctccggcagtcaaacacgtgtataagctgagccaggacaagagtcgcgaatgcaacggtctgtgcgtagggcagattttcaggattgcggtgatagacgatgataaacgctaaaatggttgcggctccgattagaaacccccttgatacgactttccagcccagttttctcgcaaacactccttctttcggatgccgcggcttccgcctcatcagatctccttccggctgatccataccgagggccatcgccggcagcccgtcagtgactaagttcacccacaatatctgaatcggaacgagcggcagcggcagagcgagaagcatcgcaaacagcatcactaaaatttcaccgacgttggaggcgagcaaataccggacgaattttcttatattttcatagatattccgtccctcttttatggctgatttaatcgtagcaaagttatcatctaccagaatgagagaagaggcttcctttgccacatccgttcccgtcacgcccatggcaacaccgatatctgcctgctttatggccggcgcgtcattaaccccgtctcccgtcatggcgacgacgtgtccgttttcctggaacgctttgacgattttcaatttatgttcaggcgatacgcgtgcgaagacgtagacatcatcgaccgtttcgataagttctttgtccgtaagctcattcagcgtcttcccgtccatcacacgcccctttttcggaagaagacgcaaatcttttgcaatggcctttgccgtttcgacgtgatcccctgtgatcataaccgttttaatgccggcttcacggcattctttaatcgcctgtctgacctccggacggggcggatcaattatgcctgacaagccgagcatcgtcagatttttttccgcctgctccattgtcggcttttctccgggcttaagcggtttataagcaatcgcgatcgtacgcaaagcttgcgacgccagctctttcagaaccgcttccgtttctgctttcttttcttctgaaaaaggcgtacttcttgcgccgtgcatcagatgtgacgagcggtcaatcagcacatcgggcgctcctttagtgatgacgaactgctttttttcctgatcctctacaatgacggtcatcattttgcggacggagtcaaacggaaactcggcaaccacgcggtagtgcccgctgagccaatcgtttgaatagccgccctttcttgcagccgtcagcagcgctccttctgtcggatcgccgtcgagtacataacggccgtctttcagtgcgatttcggatgtgttgcacaacgcgccgaaaaccagcatctgttcaagaatcttctcatctttcggcttgatttcccgctcatctcgggtgaaaacgccctccggctcatagccgatgcctgacactttataaattttgccgcctgaccacatatgggtgacggtcattttgttttgtgtcagcgtgccggttttatcagaacaaatgacagaggcgcagcccaatgtttcaaccgccgggagctttctgacaattgatttttgtttgatcatgcgctggacgccgattgataatgccaccgtaacaatggcgggaagcccttccggaatcgcggcgacggccaatgacaccccggccaaaaacatgctgtaaagatcatgtccctgtaagacgccgactgcaacgaccaataccgttaaaaggagcgcgacgataattaaaattttgccgagctcttcaagtcttcgctgcagcggtgttgaaaggctgccggcggattccagcatatcggcgattttgcccattgccgtattcattcctgtaccgacgacgacgccgacaccgctgccgcgcgttacgatcgtacccataaacgccatattgctgatgtcgcctaacgaaacatccggctttctcagtttatcagcttgtttaaccaccggaattgattccccggtcagcgccgattcctcaatttcaaggcttttcgcttcaacgatccgcacatccgcgccaatccggtcgccgcttgaaaatttcatgatatcgccgggaacgagctccttggactgaattttcttccagctcccgtcccgcaacgctgacacatacggcgttgacagctcttttaatgcgtgtaaggacttttccgcccgccgctcttgaaaaaaaccgagaaccccattgacaaatacaatcgccataatcgctacggcatctacatattcgcctaaaaacccggatattaaggttgccgccagcagcacgagcaccataaaatctttaaattgggcgaaaaacacggcgatcgccggtgtcctcttgccctcctgaagctcgttcggcccgtgcttttcaaggcgttttttcacctctttttcggtcaacccctgtttaatggacgtatttgttgctttcagcaaatcggtttgtcccatttcatgaaacttcattcttctcgtccactcccctgcctcgctttagagatgtcactctgtaaacaagcttattctgactcgtcccttttcatgctataattatcgaatgcaggaagaaggaaagggtgttttatatgtcttttgatggcatgtttacatacggaatgacacatgaattaaacagccggatcgccggaggccggattacgagagtccatcagccttttaagcacgatgtgatatttcatatccgcgctaacggaaaaaaccataaattattattatcggcgcatccgagctattcacgggtgcacatgacaaaccaggcctatgaaaatccgagcgagccgccgatgttttgtatgctgctcagaaagcatatagaaggcggatttattgagaaaatagaacaggccggattagaccggattatgatattccggataaaaagcagaaatgaaatcggcgacgaaaccgtcagaacgctgtatgtggaaattatgggacggcacagcaatattatcctgactgacggagaaggagcgattatcgacggactgaagcatttatctccgtcgatgaacagctaccggaccgttctgccgggctatgattacaagcttcctcccgctcaggaaaaaatttcgccgcttgccgcggatgaagaggacgttttgcgttatctcagttttcaggaaggacggcttgaccagcagatcgtcagacatttctccggtgtttctccgctgtttgcaaaagaagccgtgcacagagcgggcctcgctaacaaaataacgctgccgaagacgctgattgaaatgttccatgccgtgaaagattgcaggtttacaccgaacattacgacagccggcggaaaggaatacttttatctcctgtctctcacacatgtaaacggagaagagcgcacctttcactcactgagtgagctgttggaccggttttatttcggcaaggcggaacgcgaccgcgtcaaacagcaggctcaggatctcgagcggtttgtcgcaaacgaacggaaaaagaacgccaataagataaaaaagctggaaaagacgctcgactactcagagaatgcgaaggaattccagctatacggcgaactgctgacggcaaatttgtatatgctgaaaaaaggtgacaaagaagcggaagtcatcaattattatgatgaagaaagtaagacggtgaccatccctttaaatccgaacaaaacaccgtcagaaaacgcgcagatgtattttacaaagtatcaaaaggcgaagaattccgtcgaggtggtaaaagaacagatccgtctggccgaggaggaaatcgcttatttcgatcagctgatccagcagctctcctccgcctccacaaaggatattcacgaaataagggaagagcttgtggaaggcaaatatctgcgaccgaaacagcagcgaggacagaaaaaacagaagcagcacgttcctgttttggagcaatatgaatcttcacggggattgacgattcttgtcggcaaaaacaataaacaaaatgaatacttaacgacaaaagctgccgcaagggatgatttatggttccacacgaaagacattccgggttcccacgttgtgattaaaagcagcgatccagatgaacaatccatactggaggcggctgcgatcgccgcttatttttccaaagcgaaagattccggctccgttcccgttgattatacaaaaatcagacacgtgaaaaagccaaacggcgcaaagcccggatttgtcacctatgacagccagcataccgtatttgtcacacctgatgccgaccttgtcatacggctgaaaaaataaacgcacctccaagctgaaacccgcactcagcttggaggtgttttttattacgtataaacggagatgaaactctcccagccgtcagaaccgatctatacagtatctgatcagtttcccgtcatgtctgcctgatccgccgggggccgtctctgattaaagcggtcacacctgatttggcggcggatactgtcaccttccctcgccgcacctgagcacatccgggcagtcaatataatcatgccggggtctctgaccgttcctttgtatgcgggcggagtccaggcggcatggggagggactgacaaggtgttttttatggtcttcttcttttctcaaataatcgatccacttcttcagccaaatcagcagtaatgagaggctttatgtcctcagccagtcttttcgtatgtgcagggcttgcgccgcttgttgatacggatacttgaatgcgccctttgcggatgatcttcggcatatacacgctgccccgttcagcctcgcttacacaattgaccagctgcgtttcagaagcgccctcggctatctcccgattcacgctgcggtcatttgtcgcggcaatgatgaaaaaagcgggcgcaagatccttcatttcaattttacgggaaacccagcggatacgtccttcatccgccagctgtttaatttcaggcagggcatcgggactgattacagtaatatccgcgccttccggaagcactgttttgagtcttcttaaggcaacattgcctccgcccgcgatgacaattctttttccgctgagattaatgtgcagaggcagcatactgtccccccttaaaatcaaactgcccgccggggtttcggacagcttccgtcacacggttcaaaaacgcctgcttaatatgcgggtgaaaacctaagtatgaagcgagatgaacattttgattgaccgtttgaagcttttgaacttcccgttcaatctcagtcattaaaagcccggtaaacagaagatatggaacgataaaaacgggtgctccgtcatcctcttcaaggccggcaaacacttctttatagtgcgggtcacatgctgttaaaaaacaagggatgacttctttaacaggtgtaatcgcctcaagttttccggcaatctcactgactgcgtttttaactgccggatctgtgcttcctcttccgatcagcaccactttcgcctgctcaatgggcactccggtatcttcaatgcgatgatgcaccgcttttacgacttcatcgtccactccgatcggaacaccatatgtcacttttatatcgggatgaagggccgccgcacgggcgatttcagccggaatgtcatgttttgcgtgggcagcggtcaacagcagtaaaggcacggccgcaatatgagtggcgccttgtctgacacatgcttcaaatcccgcttcaatagacggttcctgcagttctaaaaaacaaatttcctgaatgggagcgtcagcgtgcggcatgcacccttttaaaaacgccgccgactctgtctgcgcttttttcagcctgcttccgtgcccgatgtataaaatcgcctgcttcatttacaacgcctcgctcaaatccagatttttctgatcagatgcataccagtccagtttgcagtgataattgacgacatcgccgataacaattaagctcgggtttttgatttcttcttttatcactgtgtctgaaagcgtgccgacggtgcagacgactgttttttgcctgtccgtcgttccccaatgaataaaggctgccggggtgccggcgtctctgccgttttccagcagcattctttcaatctgccggatatttttaattcccatataaatcaccagcgtatcaatgcccgtcgccagcgctttccatttttcttcaaagtcgtcttcttgtttataatgtcccgtaacgaatgcgacattggagctcgcctctctgtgcgtcacgggaatgccggcataagcagcagccgcgattcctgatgtaatgccgggaacgatctcaaacggaatggcgttttttgcgagagcctccgcttcttcgcctccgcggccgaaaacaaacgggtcgcctcccttgagccttacaacggttttcccctttttcgcatacttcacaaggaaacggttgatcgtatcctgtttcataatgtgaaaatccgggagctttccgcagtaaatcagatccgcttcttctccggcatattgtaaaatctctttgcttaccaatctgtcatataatataacatccgctttctgtatggctttcattgccttcaccgttaataagtccggatctcccggaccggctccaacgataaatactttccccatagcatgtctccccgatccgttttgaaatcttcccagaacagccgcgaggccgcacttcagctattttaccatatcccgccattgcgggggatatccggctgattgcgcggcctttttggacctattatgctaagctgtttttcacaaagtcaaccagtcttccggtgcattcttcgcgttcacatttgcctgaatcaagtacgagctcaggcgctttcggctcttcatacggtgagtcgatccccgtaaagaacggaatttcaccatttcttgcttttttatataaacctttcggatcgcgcttttcacatatatcgaggtcgcatttcacatagatttcattaaattcgccctccgccacaagctctctcacctgatctctgtcctcacggaacggagaaataaaagccgtgatgacgatggttccctgctgaacgaaaagcttcgccacttccccgatgcggcgtatattttcctttcggtcatcatcggaaaaacctaagtccttgtttaagccgtggcggatgttatcaccatcaagcacgatgacttgatagccttgttcaaacagctcgcgcgctgcggcgtttgcaatcgtggatttccctgaaccgcttaagcccgtcagccagaggatagagcttttatgcttgtttttctgctggtattcttctttcgttattgaggcttcatgccacacgatatcacgatttgtcattctattttcctccttaagaaacgcctgcttcttctttcgttttcagccctttaatcaacacctcgacaacttcaggacggctgaattccgccggcggcatgacgccgcttcgcagcatttctctgacctttgttcctgacagaatgacgtggtcttctctgtcatgcgggcatgttttggccgttcccatgttgccgcatttctggcagaagaagctgtgctcgaatttcatcggtgtaatcccgagttcatccgctgtaaattgatcaaacagctcttgcgcttcatatgtgccgtagtaatcaccgacgccggcatgatcgcggccgacgataaaatgcgtgcagccgtagtttttgcggacaagcgcgtggaaaatggcttctctcggccccgcataccgcatagccgccaaaaatacgccgaggaacacgcggtctttcggataataatgatcgagcagcacctggtagctttccattctgacatccgccggaatgtcatctgattttgtttcaccgacgagcgggttcaaaaacaggccgtcaaccgtctcaagcgcggttttttggatatattcgtgggcgcggtgaaccggatttctcgtttggaaaccgacgatggttttccagcccttttcttcgaagcttcgtcttgtatcagcaggttcaaatgtaaactcgggaaactgctttgacgcttttttaactaatgtgatcggcccgccgacatacgtatcgccgcgtgaaaataattttttcacgcccggatgcgcggcatcatcggttttatatacgtgaacggcttctttttgtttatccggcgtataaatatcttcgatgtcgactacgccgtatgtttctccgccgtaagtcagtttcaccgtgtcgccgacggcaagctcagccgctttttctgaatcgaccggaagcgtgatcggcagggaccagacaaccccggatgccagacgcatattttcaacgactgacacgtaatctttttctgtgaaaaatccttcaatcgggctgtaccccccgatcccgatcagctctaaatcagcgaacgaaatcaaatcaagctcaatttctttttggacggatgtaagatcatactgctcatttacccgattaattaatgttcctccgtgcggtgctaaactcataatacatgattcctcccagttaacagataaataaactcagattaatagttaaatgcctccgccttgttcatggacagagcgtttctcttttcggatggctttcatcagactggcggctccgccagctgccaaaagcacgctggccatcataaagatggaatagtaatctccttttaacagcagggagacaagcaaatacgaaatcgacagtgacaaaaacggcgaaacgacccatactttgagcatcgttttcacgacttctttatgaaaaacgttcggcccgtttttggccattccgataccgataattgatgatgatgtgacttgcgccaatgggaccggcagaccgaagacggaactgataatgacaagccccgcgccggttcctgaaagcagtatgccttctccggctgaaaatctcgtaatctttttcccgttggtttcaagcactttacgtcctaaaagcagagcgccgagagcgacaaagatgcctccgtacagcgttcctttggacacgctgagcacgcccgcagcaaccaaagggcccaccgcatttgcgacattgttcattccggctgaaaaagcttcccaaaaccccgcaatcagcagcacaatccccaaaatcttctgtttccgattcgaaatgactcgaatattcagagaactgaataccttcgagacgagaaacgtgaaacagaacgcgacgaacggtacgagcacccaaaaactcacgatgactaaaagatgctgtaaaaacaatactttgtacgcgacgccgacaccgacaatcgccccgacagtgacctcactcgtcgacagcggaatgccgagcacattcgccgtgaataatgatagcgccgccgatccgataataatgcagacaatggtgagcgtaatggtttgttcgggaatgattccgccgctgatcgtcttaacgacttctccgccgccgataaccgcccctgacaggactccggccgcgcagatgatcagcgcatgcgttttctttttaactgcgccggacccgtaagcgactcccattgaagccgcggctccgctggctccgatattcatggcaaaaaacaggcagaataaaatagcggctaattccatcgtgcagctcctttattcatgcagtccgcattctgttttcgccatgccgttccatctgccgctccgcaaatcttccgcggtaaacgcaggtgaagtgcacggttcacagccgatgctcggatacccctgatcgtggaggatattgtaatccagctcatgcttggaagtatatctccagatgtctttccatgtccaatggatcagcgggcatactttaatcgattgaaacttgtcgtctttattcaggaaattcgtattcgcccggctcggcccttgatcccggcgaaggccggacagccatgccggatgccctgcgagcgcttctcttaacggcagaatttttctgatgtagcagcactggttcggttctctttcccacagtttatctccgtgagcctcggcctgttcttcaagagtaaggctgggctttttcaggataatgttcagtcccgggtaacgctctttcactttttcgatcgtttcatatgtttctttaaagtgaagacccgtgtcgagaaacacgatttccgcgtctttctttactttagaaattaaatcgatcaggacgatgccctcaatcccgaagctgcacgcgtaaacaagctggtctccgtagtggccgtatgcccattttaaaacggacagcgcgcctttataggaatcgtcttccggaaatgtaatcgccggctcttcccatgtgtcatacgttagcatttttcctttcctcctcccggagacaatcaaacagctgttgttttctgccggttgtcttatccctcaatctttttttcatataaaaaactttcaatccagcggaatgaaagacagtgacccggtatagcccttatcttcaaaatgctgtgcatttttctggatgcggcaccttgcatgacacgcaggttgccgggcgtcatcggtccagtccctcagccgctcttgataagctttttagatttgtactaaattttagcacaattctaacagaagtcaacccgagttttttgataggaataataaaacaggccctgaggcctgtttttattgtcattattttttaaaccaatcttttgactcgggattctgtttccatgatttcagtttctcaacgtcatctgaatgaatcgttccgttttcaagcgcgacttcaatcagcgtgtcataatccgttaacgagtaataaggaagacccgcttttttaaaggcttcttttgctttcggcagtccgtatgtaaaaatggaaatgacgccgaggacttccgcgccctctctttgaagggccgccgcagcttcaagcacgctgcctccggtagaaatcaagtcttcaatcacgactgttttttgtcctttcttaatggcgccttctatttgatttcctttgccgtgcgctttcggtttgcttctgacgtagcacatcggcgcgcctgtacggtctgcgagaagcgcagcatgcggaatgcccgccgttgcagtgcccgcgatcatctccgcctcgggaaaatgctctttcagcagtttgccaagcccgtccgccacatcatttctcacttttggatacgacaatgtcagacggttgtcacaatagatcggtgataaaatgccgctcgcccacgtaaacggctcattcgggcgtaaaaagacagcttcaatgtgtaatagatgttttgcgatagcctgtttcatcggcgaacgccctcccattccagtttaattgcttcatatgcttcaacggggttttccgcttttgtaattgagcggcccacaacgatggctgacgaaccgttttctttcgcaaatgacggagtcgccgtccggacttgatcgtcagctgtgtcactggccgtgcggatgcccggtgtgactgtcagaaatgaaggccggaccgcttcataaatggcttttgtttcatgtaccgaacataccactccgtccagcccgcactcttccgccattttgccgtaatgcacaaccgtttctaacagcggcttatgcagcagaagctcttccttcgccacctgctctgaagtgctggtcagctgagtcaccgcgattaaagacgggcgttttctgcctgccggcgtgccttcttcaagcccctcaagggccgcgcgcatcatgcgtgcgccccctgctgcatgcacattgacaagatcaacgccgaggccggccagccgcttcatcgctttattgaccgtagtcgggatatcatgaagctttaaatctaaaaatatatcacagttccgttcttttaattggtgaatgatggcggggccttcctgataaaaaagttccatccccgttttgacaaaaagcctttccttttcaaacaagtctaaaaacgttaaagtctcttcccctgatgcaaaatcaagcgcgatgatgggcaggttgtttttcatgtttccagctccttccgatgcattcacttacagattgaaagccgtgttggcgcagcacacgggggagctgttctatgatttccgggcagacgaacggattgacgaagtttgccgtgccgacggcaaccgcactcgctcccgcaagaagaaattctaatgcatcctctgcggtctgaacgccgcccatcccgataatcgggatttgaacggcctggctgacttcgtataccatccggatggcgaccggtttgatcgccgggcctgacagtccgcccgttttatttgctaagatcggccgtcccgtcttgagatcgagcctcatcccgatgagtgtattaatcatcgtcagaccgtcagcaccggccgcttcaatcgccttggcaatttcggttatgtttgcgacattaggcgaaagcttcacatacacaggcactgcggaaacttctttcaccgcttttgtcagttcggccgccatgacgggatcagtaccaaaagcaatcccccccgttttgacattcggacatgaaatgttaagctcaagcgcatgcacattcggcgcttggctgatgtgctcggccacttctttatagtcgtccacctgagaaccggcgacatttgcgataatcggcgtgtcaaattgttcgagccaaggcagctcatgattgagcacatgctcgaggccgggattttgcagaccgatggcattcagcattcccgcgcttgtctccgccactctcggcgtcggatttccgaagcgggcttcgttcgtcgttgctttaatcataatgcctccgaggcatgataaatcgtaaaatccggcatattctttcccgaaaccgaaacatccggaagcggggatgatcggatttttcaattggagacccggcagattcacctctaacattacagcgccacctcctcagctttaaataccggcccgtcaaggcagacctttacataggatgtatcgctttcacccgtgcggcacacgcaggcgaagcaggctccgatgccgcagcccatccgctcttccatcgaaagataaacctctttatggccgtactgctgcttcagagctttcagcatcggtgtcggtccgcagcttagcaggacatcgaattcgagctgcttttcacggatgacatcggtgacaaaccctttctctccatatgttccgtcagccgtcgccacataggtgtctccgtacgcacgacattcctgttcgtaaaaaacatcctttgctgattgaaatccaagcacatgaatgacgtttacgcctttttccgtcaggcgctttgacagttcctgcaaaggcggaacccccactccgcctccgactaacagcgcggttttgccgggttcaatccgccggatggggaatccgttgccgagagggccgagaacgtctatcctgccgccctcttttttctcggacaaaagacgcgttccctcaccgtcagctctgtagataacggatacttcatccgcggcgaaatcgacgtccgcaatgctgagcggtcttcttaatagcggcgtgaccgcgtcactcaccttcagatgtagaaattgacccggctcggtaaggtgccggacaagctctcctttcagcaccatcttataaatccggtcggcaatttctaagttggattgaacagtcaaatgcactttcttcatatcgtgactgccgccttttgattggtttcggatgcaggcatatgatccgcccggaatgtcatgctttccagtacccgcaaaatggcttcggccgtatctaaagatgtcaggcaggcgactccgttctcaacggattcgcggcggattctgaagccgtctctggccggctgtttgccctttgtcagcgtattgatgacaaattgcgcttcgccgtttctgatcacatcgagcagatttttcccttcttcgccgatttttccgacgacttgagccggaatctgagcgtcttttaaataagccgccgttccttccgtcgccaagattttatagccgatggcgtggaaccgcttcgcgatcagcagtccttcttctttatctttatcggcaacagtcaacagcactgagccgtagttcgggatttgaatgccagaagcaatcagcgctttatagagcgctttttccagggttgaatctttgcccatgacctctcccgtcgacttcatttcagggcctaacgtaatatccactcttctcagcttcgcgaatgagaagacaggcgctttcacgaataccccctgctgttcaggctgcagcccctcttgatagccgaaatcagcaagcttttggccgagaatgacctttgtcgccagattcgccatcggaatctttgtgattttgcttaagaacggcacggttctgcttgaccgcggatttacctcaagcacatacacttcaccttgcgacagtacgaactggatgttcagcaacccgatgatgttaaggccttttgccaaggctacagtgtattgttcgatttttttcttaatgtcttcgcttaaagactgaggcggatagacggcgattgaatcccctgaatggacgccggcccgctcgatatgctccataattcccggaataacgactgtttcgccgtcagatacggcatcgacttcgatttctttccccgtcagataacggtcgattaacaccggatgctgcgggttgattttgaccgcatttttcatatagtgaagcagctcttcttcgtgatagacgatttccatcgcccggccgccgagcacatacgaagggcggacaagtaccggatagccgatggatgcggcaattttgaccgcttcgttcaccgacacagcggtttttccgagcggctgcggcacattcagcgcctcaagcgcctgctcaaacttatcccggtcttccgcacggtctaaatcttcaagtgatgtgccgaggattttgacgccgcgggcgctcaattcttccgcaagattgatcgccgtctggccgccgaattggacgacaacgccttccggctgctccaaatcgatgatgtgcatgacatcttctaccgtcagcggttcaaaatacagtttgtctgatatgctgaaatcagtggacaccgtctcaggattgttgttgataataatcgcttcatagcctgcctgcttgatcgcccagacagaatgaacggtcgcatagtcaaattcgacgccctgtccgatacggatcggcccggaaccgaggacgacgacgctttttcttgaagtaatctcagactcattttcttcctcatatgtgctgtaaaagtacggggtttctgattcaaattccgccgcgcatgtatccaccattttatatacaggcttgatgtctgcttcttttcgcatttgatacagctcttgttccggcatgttccattcccggctgatatatttgtcggagaaaccgagttccttcgctgtctgcaggacggtaaggctgcctttttccgctttcagctctgtttcaaaagcgaccagcttacagagcttgtgcaaaaagaatacgtcaattgcagaaaactcatgaagctgctcgactgtgtagcctcttctgaacgcttcagcaagataaaacagccgttcatctccggcctttctgatccgtttttccaaaagcccgtcagaaatctcttccgcatccttcagttccaggtgatagacatcggcttccagtgagcggaccgcctttaacagcgattcttcaagggtgcgtccgatggccatgacctctccggtggctttcatttgcgtcccgagcctgcggtttgccgactcaaatttgtcgaacggccagcgcgggattttagaaacgacatagtcaagcgcgggctcaaaagccgcatatgtttttcccgttacgggattcatcatttcatcaagagaaagcccgactgcgattttcgccgcaagctttgcgatcgggtaacccgtcgcttttgaggcaagggcagatgagcggctcacccgcggattcacttcgataatgtaatattggaagctgtcgggatcgagcgcgagctgaacattacagccgccttcaatgccgagcgcgcggatcagctttaatgaaacattgcgcaaaagctggtattcccggtcgctcaaagtctggctcggggcaacgacgatgctgtcgcccgtatggatgccgaccggatcgatattttccatgttgcagacgacgatcgcgtgatctctgctgtctctcatgacttcatattcgatctctttgtaaccggcaatgcttttttcaagaaggcactgatggacggggctgagttttaatccgttttcgacgatctctttcagttctgcttcattcgagcagatgccgccgcccgttccgcctaatgtgtaagcggggcgcacgataaccggaaacccgatccggccgacaaattcctcggcttcctgtaaagtgcggatgatctcactttccggcaccggttcattcagctcattcatcagcgtacggaataagtcgcggtcttccgcctgctggatggcggacagctttgtcccgagcacttccactccgcattcctcaagaaccccgagttcagacagctcgacggcaagattcagtccggtctgtcctcccagagtcggcaggatggcgtccggccgttcttttctgataatacgcgtgagaaactccggcgtcagcggctctatgtatacccgatcagccatttccgtatccgtcataatcgttgccggattcgagttgacgagaatgacttcatagccttcttccttcaaagcgagacacgcctgtgtgcccgcataatcaaattccgccgcctgtccgataataatcgggcctgatccgatcactaaaatctttttaatatctacgcgttttggcataccgcttccccttctttctcagttgtttcgatcaagtcaatgaatctgtcaaataaatgattggcgtcttccggccccggtgaagcttcagggtggtactgaaccgtaaatgccggcaatgttttatgcttgagtccttcgatcgtttgatcattgatcgcaatgtgcgtcacttcaagctctgtctcatctattgaagaaactgtatatccgtggttttgggcggttaaagcgactttccctgtcgcaagctctttaaccggatgattggaacccctgtgtccgaatttcattttttccgtttccgctccggatgccagtgcaaataattggtggccgaggcagattccgaataacggcaccttcccgagtatgccttttatcatttcaatggcttccggtacatctttcggatctccgggtccgttagaaagcatgatgccgtccggcttgagctgaagcacttcttccgccgttacattgtacggcacaacgatgacatcgcattttcttttgtttaactctcttaaaatgccgtgcttcataccgaaatcgacgagtacgatgcgtttgccgcggcccggactcggatatgccgttttcgcagatacttgagcgacttgatttctcggcagttccgtttctttcagccttgcaagaacctctccgacattctcctcacttgaagcaaacgttccctttaatgcgccggccgtgcggatcattcttgtgagctttctcgtgtcaatcccttgtaagccgggaatatttttcattttcaaatactcgtcaagcgtgtaagccgaacgccagttggaaggcagctcgcacagttcttttacgatcagcccttttacaaaaggagtgatggattcaaagtcatctctgttaattccgtagttgccgatcagaggatacgtcagcgtcacgatctgcccgcagtaagaagggtctgataaaatttcctgataaccggtcattcccgtgttgaatacgacttcacccgcggtatgctccaggctcccgaatgcttcaccctcaaataccgctccattttccagcactagtcttcttttcatttgacgagtctcccttcttcgtatgcaagcttaccggcagccatcgttgcaacaggccagccgaagcacttcatcttgttgaatggcgtattttttcctttagataaaaatgtatctttgtcaatggctgcttctttttccagatcaatcagggtgatgtcagccggcgcccccggtgcaagcgttccgtacggaagatcaaatgcctcgcaaggttttgacgtcatgaaatcaaccagctgcttcagcgtccacgccccgtttttcacaaaatgtgtgtacagaagcggaaaggctgtttctaaaccgacgataccgaaaggcgcaagcttcatatccgtgtttttctcttcttttgtatgcggcgcatggtcagtggcgatgaaatcaatcgtaccgtctaaaagcccttcaatcagcgcctctctgtcctctttgctgcgaagcggcggattcattttaaaattggtatcaagtcccgggatatcttcgtcacaaagcagcaggtggtgcggcgatacttccgccgtcacgcggattcccgctttttttgcgtctcttacggctctgacggattctttcgtgctgatatgacacacgtggtaatggcagcccgccgcttccgccagcaggacgtcacgggcgatatgtaccgcttcacaaatggaaggtatgccgttcaggccgttcgcttttgaaaaagaaccttcatgcacactccctccgtaaataagtgagttatcctcacaatgagcgacaatcgctttattcattgaagccgcccgtttcatggcttcatacatcattccagccgtctgaacgccgacgccgtcatcggtgaaggcgaatgcgcccgcttcatgaagcgcctcaaaatctgtcatttcttcgccggtttgtctgatcgtaatggatgcgtaaggaagaaccctgacagatgaggtttctttgatccggtttttcagccattccatctgctctttcgtatccggcaccggtcttgtattcggcatggctgcgactgtggtaaagccgccccgcgccgcggctttagagcccgtctcaatggtttcttttttctcgccgcccggttctctgaagtggacatgaaggtctacgagtcccggtgaaacgaacagtccgtcagcgtcgatcaccgtttctccgtctttcgctgtcagaagcccggtttccgaaatgaattcacccgttacccggatatcctgtgccactttttctccctgttcatttaacatccagccgtttttaatgagataagacataagccgcttctcccctttttacattggtttgcagtgctctttttaagactgccattctgatatacacgccattttccatttgtttaaagattcttgattttccgcattccactaatgttgtgtcaatttcgactcctctgttcaccggtgcgggatgcatgatgatggcatgccgcttcatgctctccgcccgctttgcggtcagcccgtatgcttccaggtagcctttttggtcggcttctgtctgatgcctttcattttggatgcggagcagcatgacgacatctgaagcttgtatggcttcatccgtctgtacacaggtgccgaaggcgtttttctcatcctgccattgcggcggccctgaaaacagcacgcgtgcgccgagccttgtcagcacctcggcatttgaccttgccaccctgctgtgtttgatatcgccatgaatggaaaccgtcaggccctgaaaggtctcaaattcctcttgaatcgtcattaaatcgagtaatgactgagtcgggtgctggccgcagccgtcgccggcgtttaagatcggaatattgactctgccggtcagatctttgtaatattcatccgtgctgtgcctgatgacgcaggcgtccgctccgattgattcgagagttttgaccgtatcgtataaggactcgcctttttgaacgcttgtgctcgtgccgtctaagctgagcacgttcatcccgagtttcttttccgccacttcaaagctgaaccgcgttctcgtgctcggttcaaaaaacagattcgcaacaaattttcccgcgagttcggggcggactgttccctcttttatcgcttttgcctcacgcagcagttctgtaatttcagccgcgctcagttcagacatcgccgttaaatgattcatgtttttctcctccgtttccgcttgaaggccgtaaaaaaacaccccggtctatagactcggggtgcggttaaagagagaagcagcgtacagcttcttcccgttataacccttccaagcctctctggactttctttaaaaggttttacatatgattttgtttttctgatgcaatcgcgtcttcttcatttgcatgcggcaggataaggttcaggatgactccgacgattgccgcaagcgccatgccggatatttggaatccgccttttgatacttgaataaaagcccctccgacgccgatcacgaggatgacggatgtgataatcaaatttctcttgttttcataatcaatgttgttgtcaatcagcattcttaagccgctggaggcgataattccgaagagcaggaaggaaacgcctcccataaccgcggacggaacagagctgatcagcgccgaaacttttccgataaatccgaagcacagcgcaatcactcccgcgccgccgatgacaaagacgctgaaaactctcgtaattgccagtacaccgatgttttcgccatatgttgtcgtgggcgggccgccgattaacgaagcaatgatcgtcgcaacactgtcccccattatggagcggtgcagtcccggctttttaatgaaatcctgtccgacgactttactcagcaccatttgatggccgatatgttctgacatcgtcacgaaagcgaccggcaccatcgcagccgcaatgcccaatgtcactgacggcgtatagtctttgaaagggatgataaattcaggaacggcgaaccactttgcatcaatgaccggctgaaaattgacgatgccctgtgtcagcgcaaacagatagccgcctataatgccgatcaataccggaatcaggcttaaaaatccccgtaaaaagatggcgcagataatggtgatggccaaagtgacgccggctacactgaaatgtttcaagctgtagacgagttccttcgcattcggatcggcatacattgccatattgacggctgtgcttgccagtccgaggccgatgacgatgatgaccggcccaacgacgaccgggggcagcagcttcatcagccaccccgttccaagctgcctgatgagcaatgcgatcaggccgtacacaattcccgccaggaaagcgccgaccatggcagcccccggccctcccgtcgccttcaccaagataatcggtgatataaaggcgaatgatgagccgagataagcgggaatctggccttttgtcaccaagagataggcgagtgtcccgattccgctcgtgacaagcgccactgccggactcattccgaccagtttcggcacgagtatggttgaaccgaacatggcgaataaatgctgcaggctgaatgacagccaagacaatggattggggacgtccctgactcccaggtttacttttttcttactcatggcgttttcctcccggttgactttcaaatggtataaaaaaacctctttgctttttgcgcaaagaggcatacaaaacccggccgcgtcgatccgcccggctttgtgttttaaaatcctctttgcaaactctctggaatgcatttaaaaagggtgattatttattttcgtaaatggcgaccatatcagtctgatcaacttcgctcagctgaaccatcactttttcagcttttgaggtcggaatgtttttcccgatatagtccgctctgatcggcagctcccggtgccctctgtcgacaagcacggcaagctgtatcgatgacggccgtccgacatcaacgagggcatccatcgccgctctcaccgtccggccggtataaagcacatcatcaaccacaatgaccttttggtctgtaatatcggccggaatgtccgcgccttttacaagcggctcttcattgctcgtttttttcgtgaggtcgtcacggtaaagggtgatatcgatttccccgacggtgaccggattcccttcaatctgttcgatccgctcggccagccgcttcgctaaataaatgcctcttgttttaatccctacaagaatgcagtcattcattcctttattccgttcgatcatttcatgggctatccttgtcagcgcccgcctgatcgcctgttcgtcgagaataacagctttttgattcactcgtgacacctctccattcgtatataagaagaaaaaacccctcctgccagagcatagaggggttcctttccaggacgaagacacatgcgtatctcttctgtcctatccgttatccttctcagcctctctggactgtgttaaagaatctattcagcttgtttttattatttcagaaaagaaagtcgctgtcaatggctatttcttaaatcttcaatgagttttttcatatcttcaggaaggggcgcctcaaactcaatgtattcgcccgtccgcggatgatcaaaacctaatattccggcatgaagcgcctgaccattgaaatcaatggtttttctcggtccgtacttcgggtcgcctgccaaaggaaacccgatatatttcatatgaacacggatctgatgcgttcttccggtctcaagccggcactctacgagcgtgaactcttgaaaacgctcaagcacgtggaagtgcgtgacggcgtttttgctgctttctcttgttacggtcatgctttgacggtcttttttatctctcccgatcggagcgtcaatcgttccgtcatcatgtgaaatcaccccgtggacaaccgctgtgtactttctggtcacggttttattgacgagctgattaacgagtgattcatgcgccatatcgtttttagcgaccattaacagaccggaagtatctttatcaatccggtggacgattcccggacgcatgacgccgttaatgccggaaaggtcgttgcagtgagccatcagtccgtttacaagcgtccctgtcacatggccgggcgccgggtgtacaaccatgccccgcggtttgttcacaaccaagacgtcctgatcctcatagtaaatgtccaaatccatcggttctgcaagcacgtccaattcttccggttcaggaatggtgacgtttacctgatcgccgggctgcattttataattcgcttttacggatttgccgttaacggataccagtccctcttttacccattgctgcacttgagtgcgtgaccagttttctcccgttgaagccaaaaatttatcaatccgttcgctcttttgttcaggctgaacggttatctcaaattgattcatgttattgctccttctttttcccgctgtcaaacagcatatgaataaataaaagtattacaccgacgcacagtgaggagtccgcgatattaaaaatcggatagtgataatccacgatgatgacatgaataaaatccaccacttcctggcgcgccgcccggtcaataaagtttccggccgcaccgcccagcattaagccgagagaacttccgagtaacatctgcccttttgcataacgctgtatgtaataaacgattccgataatcacggcgatggtaatgacgtagaaaaaccacatttggccggctaaaatcccccacgccgctcccgtgttgcgatgagatgtgatataaagcacctggtcgatgacaggtatgctttgtcccaattccatatggctgacgacaagccatttggtcaattggtcggcaataataataaaaagagcgataagataataaagcacacacgttcctccagtatacagttacttttatcctttatgaattttatcagtaaaaggtgccagagtaaaggcagatcataagcgcatgcaaacagacgctgtcactcatacagcgcctgatcatatgcataatctccgggttcccaatatggaagggttttcttttcaaattgagcgggataatagaaatcatcagcggttctggccgtcggcagcaccgcaagtttttcaatcggaatggggtcgcctgttttttcacaataaccgtacgtattgttttcaaacttagacagggcaagaagaacgtcctgaagttcttcttttatatgatagatcagagttgcttcttggtcgttcattgaaggttcaacagatgctgacatttgaaagcaagaatattcgaataatcttgattgaagttcttctttcatcatgagaagctccgtgtggattgcggtcagttgatcattcattcatcacaactcctgctcttgatgttatagctttattgttgcccccagggcgccatttgaagcccataagatttttcctgtcgttctaatcgatgacattagtggcatgtaaaaaaagcgcccggctgtcaccgggcgctttctcattcattatttttgataatatttttcaacgatttccgcattgcgcagtgataatgtcggatattttggattggctccgacatctttagaaattacgcgggaacgttcacacatctggccttccgctttttctacggtcatttttcctgttgtgaagctttgcgcgttttcaggcgcttcactttcgtcttttactgtcagttctgagacgataaacagctgcgcgatattttctttaatggatgacaagaggtcgcggttttctttgttcggatacaaagtcaggctcgcttccaatgatcttccgataattttttcgttacgggctgtttccaaagctttcagcacgtcgtttcgaagctccatgaagcggtcgaacttttcttctgtcgcttgactgtccggaacagcaatggtttccggcatatctgtcagctgcacgctcgcttcttcaacaaatgataagtgagaccacatttcatccgccgtatgcgggagaatcggcgccgtcagcttcactaacgccagcagcgtttcatagaagacggtctgcatgctgcggcggtccggatgatccgcatgctcgatgtacacaacatcttttgcaaaatcaagatagaaagagctgagctcgatcgtacagaaattgtgaatgctgtgataaacaaccgcaaattcatattcatcgtacgcttttttcaccttatcgatcagcttattcagcttgatcagcatatattgatccacttcgcggagatcttttacatcaacggcattgacacttggattgaaatcgaacaggttgccgtgaaggaagcggaacgtgttgcggactttccggtatacttccgcgacctgcttcagaatggcgtcagacacgcgaacgtccgcctgataatccactgacgatacccataatcttaagatgtcggcaccaagctgtttcatgactttagccggaacaacaacgttaccgattgatttactcatcttgcgtccttctccatccagtgcgaacccatggctgagcacacctttatacggcgcttttcctgttacggctactgctgtagaaagagaagagttaaaccagccgcgatattggtcagatccctctaggtataaatcagccgggcgaacgaggtcatcacgttcttcaagcactgcttgatgtgaagagcctgaatcaaaccaaacatccatgatatcctgttcttttgtaaatgtgccgttcgggctgccaggatgcgtaaagccttccggaagaagatcctttgcttctttttcaaaccaaatgtttgatccgtgctgtctgaacaattcagaaacatgttcaatggtttcatctgtaataatcggttctccgttttcagcgtaaaataccggaatcggcacaccccacgcacgctgtctggaaatacaccagtctccgcggtcccgaaccatgttgtgcaaacgctgctcaccccattcaggaacccatttggtttctttaatggcatccagcaggtctgatctgaaatctttaatagacgcaaaccattgcgctgtcgctctgaaaatggttggtttttttgttctccaatcatgcggataagagtgagtaatgaattcaagcttcacaagtgcgcctttttcatcgagctgctgtgtgatcgctttgtttgcatcatcatagaacatgccttcaaacccaggagcttcgcttgtcattacacctttttcatcgaccgggcaaagcacatctaaaccgtatttttggccaatgataaagtcatcttccccatgtcctggcgctgtatgaacacagcctgttccggcatcagttgttacgtgttcaccaagcataacgagagagtctctgccatatagcgggtgttcagcgataatgttctcaaggtcttttcctttgaccgttcttgtcacttcatactgatcaaatccgcatgctgatgcaacactttcgactaaggcacttgctacgacaaagcggtcttcacctactgcaatcacgctgtactcaagatcagggtgcactgaaattccgaggttcgccggaattgtccaaggcgttgttgtccaaatgatgatgcgctcgccgttttcaagaacgccttttccgtcttttacaccaaaagcgacgtaaatagatgctgaacgtttgtcttgatattcgatctcggcttcagccagagcagactcacttgaaggtgaccagttaaccggtttaaggcctttgtaaatgtagcctcgttttgccatttcaccaaatacgcggatttgctgcgcttcgtattccggttttaatgtcacgtatgggttttcccagtcaccgcggacaccaagacgtttgaattgctcacgctgtccctcgatttgcttccaagcgtactcttcacatagtttgcggaaatcagcgacggacatttctttccggtttacttttttgtttttcgtcagcgccgtttcaatcggcagtccgtgcgtatcccagcccggcacgtacggtgcgttgtagccgctcattgacttatagcggacgatgaagtctttcaggattttgttcagggcatggcccatgtggatgtctccgtttgcataaggaggtccgtcatgcaatacgaatttcgggcggtctttcgtccgttcttgaacaagacggtaaatgtcctgctcctcccagtctttttgcatgtccggctcacgattcggcagatttccgcgcatcggaaaatctgttttcggcattaacagcgtatctttgtaatccattttcattcctccacaacatttttcagaaaataaaaaaagccctctcatcccataagggacgagaaagcttatctcgcggtaccacccttttagaaaaaacggatcatccgtcttttcctctcgaacatcgtaacgtgatggaacgtcctttcctactctcggttcagaaaggaaactaaagggctgatctgcatgattccggccatcccgggctttcaccttccccgggtcgctttatagcctgttttgagtcataccggtccctttcaatcgtcttttcatctgaatttatgaacgtattatattcgaacgggccggagaatgtcaagaaaatcagaaaattattctttttcctcaaataccgcgtcgacttcgtattccagcagatgatcccaatcatcgttcttcagcaggtcgagctgcgcttcaatcagcatttggaaacgtgttctgaagactttagactgttttttcagctcttcgatttccattgcgatttttcttgatttggaaagcgactcattgatgatgcgatcagcatttttttctgcttcacggacgatcagcttcgcttccttttgcgagttgcgctttacgtcttctgcggcttcctgggctacgagaattgatttattcagcgtttcttcgatattggcaaagtggccgattttttcgtccagctcgttcactttcgcctcaagctccgtttttttacggagtgcgatttcgtaatcttttctgacctgcattaaaaattcatttacttcatcttcatcatatccgcgaaaaccttttgtaaacgttttgttatggatatcattcggcgttaatggcatattgccacctccatttttacatttcagtacggttatctagttcacattataaaacaaatacggcacagatggagaaaaaaactgaaaaaacgactcatttttgccgttcaaatgtaactttccatttgtcttttttcgtttttccgtcaacttttgccaaactgcatcgtccgaagccgcgaatcgagagcatgtccccttcagcaacctgataagacggatcttcaatggctttccaattcaccttaacgagcccgtttttcacaagcgcctgcgctttctgccgggattgcctgctcattgaagcgcagacggcgtcgagacgcaatgaagaaaccgtgtcatcccttatttcgacatctgaagcgggaatgtgaagagcggaaagctcgattttctcaagctttaccggcgctttgcccgccttggtcagctgagtgctgacaaaatcggcgatttcaccggagacgatcagctgcacggcttcctctgagaaaatcagatcgccgtatttctgccgctttaagccgatccccattaatgatccgagaagagagcggtggtcaatgctgacgaatttttcagcgtattgaacgtcaaaagcccgaagctcaaaatcatcctgttcaggttccatatattcagggtataaaatcgcgcgtttgcgctcagctctgtcatatcctccgaaaaacgcaagaccgcaggcgtcgccgataacggcttttacaatgacctgttctctgggatctaagaaatcagtcagcttcatccgatactggtccaggacaatctgtttccattcaagcgcctgatcaataaaaggccgctcgtcttgtctgaagtgctggtaaatatcgctcatgttctttcctttctatgtaaagaggcttggctggtgccaagcccgtatcaaactgtcgcattcaagtatacattgcgatcatgcggtataggccccaaagtcccgtcgtggcaaaccgaagcacgataatcgctacaatcggggatatatccagcatggcaatgggcggaatgatccttctgaacggctctaaatacggttcgcaaatcgctgcgagaaaccgtccgaccgccgtttctctcgtactcggcacccatgacataaagatatagatgatcagggcaaacgagtagatgtaaattaaataactcagaacggaaaaaatttgataaagaatcatcctgctttaccacctctgatgttcgtcttcatttataagctccgaaatcgtgccggaaacgtcgacattatcaggcgtgcacagaaaaatatctgaaccgattctctgaatgtcgccgccgatggcgtagacggtaccgcttaaaaagtcgacgattcttttcgcctgatcatgctggatgcgctgcagattgacgacaaccgcccgcctgttctttaaatgatcggcgatttcctgcgcttccgcatatacacgcggttcactcaacaccactttagaggatttctgaacactttgcaagcttactacgttctgcttgccctgcggcttctgagcgtaagcaggctgtttctctttctgctgttcatgctcttccggatgatcctgctccgtttcaatgtattcgtactcgtactcctcctcatccattgagaaaaagtttttcagtttatttttcatgctcatttgtttacaccccccggttcatttccgactaatgaagagccgattctgataaaagttgcgccctcttcaacagcgatttcataatcatttgacatgcccattgacagttccctgcacggggcgtttgtctgattcagtttttgcacctgatccctcagatcacgcaattgccggaagcaggctctgatcgtttctgtatcgtctgtcaggggagccatcgtcatcaggccctctacagaaatgtttctaaactcagaaagctctctgataaaggggatgacctcctctgttttcaaaccgtgcttagacggctcaagcgaagtattcacctgcacaaaacagcgaaccgcatgctgcgcccgtttttcaatctcttttgccaatgacagtctgtctaaggaatgaatataagatacacggtcaacgacggccttcacctttctggactgaagactgccgataaagtgccactccgggctgcctttgatgacttcctgcttatggataagctcggcatcccggttttctcccagacttgtaataccggcatcaacggcctcttgagccctttcagctgatacgtattttgtaaccgcgatgacggtaacatcttcggggcttcggcccgatctgttacatgcttcgtttattctttcgtttatatgtcgtaattgatcagcaacacgcaagatcttacgcctccttcattccgataaaggacatcatgcgtcccgttttccctttgtcgcggcggtgtgaaaagaatagttcacgctctcgttcggtgcataaaccgctgactgaaatgttttcttccggaataccgcaatgtatcagaagaagacggttgacctcttttaaatcaagctgatactggcctttttccgtttcgcatatggcggattcagccgtaaaaggcagcgcccgcacttcattgatgacgcggtcgtcgactgtatagcttcccgcgctgatggacggaccgatgacagcctgaatatctgttaaacgggagccttcttcgtttacccagcgttccgtcatgatgcgtccgatttgtttgaccgtccccttccatccggcatgggcagcgccgataatggatttcaccgggtcataaaaatacaagggcacacagtccgcaaaacaaagggccaaaaaaagattcgcatctttcgtgtagagcccgtccgtcccgcggaatgcggaagaatagtctctcgccccttttcctttatccccggctgtcacgcgccggacgcggttttcatgtgtctggtcggcgaacacccaggaatccagatcagtaccgcataaggacgctatgacttcacggtttgtcacaacatcatgagcttcgtcccggacgtgcaatccggtatttaatgactcatacggaggattgctgaccccgccgtttttcgtcgtgaatccggcgatgaccttcgtgttaagctgattcacacagttccagtcttctatcatgagtgccgagggggtggtaagactaaacgggtgatatgtattcatggagatccaacctttcgacaaacattaaaaaagcgtaatttcccactcattttaacacaattttaagcatacgtttagcggctgattgaaaaatgagataaataaatgtgccggaaacattgagatttccggctttttacaagtaaagggaggattacgctcccccctttggttcgtttacacgcactaagatgacatcttccccaattttaactatatttcgccaaggaatgatcatttcctcttcttttccgaaaaaaccgagaacttttccgctgccgcctaaaataatcgcctgaatttttcccgttgtcacgttaatatcaatatcaccgatgcttccgagtttttttccgttcgacacgtttaccacatcttttatttgaaattcagatatgctgatcatccgtatcacgccctttgcccgttctttttcctattatatgaacggcctggctgaaccttgtcacctcgggcaatcttttttgcggctgcaccagccgaggataaatctcagcataattttcgtatagtccataagctcatcaacggacacttcctcgtttacggagtgggcgttttttaaatcgccgggaccgtatatgacgctcggaatcccggcatgataaagccaccctccgtcagttacggtttgggaaacatcaatgacgggctgcagtttttttatggctgagtgtgatgcagccaagacagaaactgccggatggtccgggtcgatttccagcgccgggaacacctctcctctgtcttcaatcatcgaagagatccgccccatttgaacaccggcctgttttctttgagccacagatcactgtcagcgacacgattaatatagtcttcgatttctgcggctgcttgttcgtgcgtttcgttcggataaaagtggacggtgatccataaccggcattcatcggcgacaaacgctgcgtgtcttccgccttcaatgacggcggggttgatcgtattggtgccgggcgcaaagccgggatagcttttcgttaccgcccagtggcgctccagctctcccaaggcagcaatgattttcgccattttttcgatggcgctcgctccgaatgtgcctccgcctgcatgaatcatattgcgcctcatgccgtcatgaaatgtttgtttgcttttcaattctatccagccggtgatgacaccgccctgcccttgaatatgcaggctgctcgtatccgcgacaaccgcaaaatccgcgtgatagccgcgtttgcagcattccagcgtccccgcctcaccgacttcttctccgattacagactgttcaatgaggtcgcccggaagctcaatgccggcatcatggatcagcttcagagagaaaagaacacacgccaaaccccctttcatatcagctgcgccccttccgatcagcatgccgtcttttacgagcggctgaaaaggatcagagtgccagtattcgcccccggcttctgccacatcaatgtgtccgtttaaaatcaggctttgatgcctgcttgaatctgtcccttttaaaacaccgactacattcgggtcttccggatacacatcccacatatcgaccgagcagcccgtttcttttaaaaagccggccacccacttttgggcttctgccgtatttcttgctggcggggccggagtgggaaaggctatcagtctttcagcaatatgtatgaagtcgtgccgccgtttctccgcctggtgtaacagcatatcaatctgatgcattggaaatctcccctttggctgtatcaaaaaacccgttcattcatgaaatgaaacgggtaaaaaacggatcttcctccgcttttttcaccgcttccctccgccggcatgatccggatcaggtccgttaagggttgagacaaacgtctctctcagccgcatggcagcacccccagggtgaatatatgttattttacggatgatgcctcttttgcacgtgttaaaaacgggcggccattgttccataagacattgacaggcatatcgaaaaacgctgtaagccgctcgtcagaaagcatgtccctgattttcccggaggcgaacacctcgccctgttttaaaagcagcgcctgatcaaataccggcagaatttcttcagcgtgatgggtgacataaaggatggacggcgcattttctttttcggcgatcgacgtaatcgtgtccagcagctgctcccttgccataaaatcaagacccgtcacgggttcgtccaaaatcagcagttccggatcagccataagcgcccgcgcaatcagcgctctttgtctttccccttgtgataatgtttcataccgtctgtcggcgtaaccgatggcgcccaaatccttcagaagaccgatcgctttttcccttacttgctcactcggagtttcgtacagcccgattgaggcgtacgcgccgctgagggcgatttcaaaagcggagtccgcggcatataatttgtgctgaagacctgccgaaacaaggccgattttccttctgagcctgtcaccgagctctgttttgccgaattgatggccgagcacctgcatctctcctgaagtggggaagtaataagagcataacatattcagcaaagccgtttttccggctccgtttaatccgtacagcacccaattttcgtttttctcgacgcgccagttgatatctttcaaaatccatttcccgtttctttttaatgacacactgtccagctgtaaaatcattgcagtttcccccgtttgctttatttaaattttctaaaaacttttacacattagaatacatcacttctttgcaaacgtaaaccatcgcatgaaaaaagcctttaaacaaggtttaaaggctttttccgttattgatggatattcttattcatttgtttaatggctgccttttcaagccttgagacctgagcttgggatatgccgatttcttcagcgacttccatttgggttttcccttggaaaaagcgctttcgcaaaatcattttttcccgttcgttcagtcttctcatgccttctttcagagccagctcctcaatccattgtgtatccttgttgcgctcatcgctgatctggtccatcacgtaaatcggatcgccgccgtcattataaatcggctcaaacagtgaaaccggatcctggatggcgtcaagggcaaacacaatttcttcatggggcacttcaagaactttagcgatttcctctgctgtcggctccctgcttgtctcactgattaaccgctctcttacttgaagcgctttatatgcgatatcgcgaagcgacctcgagacgcggatcggattattatcccgcaaatatctgcggatttctccgatgatcatcggtacagcgtatgttgaaaacttaacattatggcttaggtcaaaattatcaatggatttcattagtccgatgcagccgacctgaaataagtcatcaacatactctcctctgttgttaaacctctgaatgacgcttaagacaaggcgcagattgccgtttacaagcttttccctcgctgaatcatcgccctcatcctgtaattgcctaaacagctttctcatctcttcattcttgagcaccggtaatttggaggtatccaccccgcaaatttcgactttatttcttgacacgtttttccctcccactaggagctgctgtacaacgttaagtatctcctcgggtgggaaaaatatgcaccgccattttacagaaataaacatccggctgcggcaatccttgcagcagtaagggctgtcagatggaaaaaattttacaccattttgttaaactcttttctcagtcttttgataatccgcttttcgagccgggagatataagattgtgaaatccccatcatgtcggctacatctttttgtgttttttcttcttctccgacaagcccgaaacgcagttccataatctgcttttctctttcgtttaattgctcaagcgcttttttcaaaagttttttatccacattggcttcaatgtcttttgtaataatatcatcatctgtgccgagcacatccgaaagcagcagctcgtttccgtcccaatcaatattcagcggttcatcaaaggacacctctgaacggattttattgtttcggcgcaagtacattaaaatttcgttttcgatacatcgcgacgcgtaggtggcgagtttgattttcttttccggattaaaagtgtttaccgctttgatcaaaccgatggtgccgatgctgattaagtcctcgatattgatgccggtattttcgaatttgcgggcaatgtaaacgacaagacgtaagtttctctcaatcagaatggcccgcgccgcctgatccccgctcggcagctttaataagagcacctgctcctcttctttagacaaaggcggcggcagcgcctcgcttcctcctatgtaatacacttcatcgcttttcagtccgagtttcatcagccatttataccacaaatatgtcagacgcagcttaagttttttcatcttcctcccccttctaaatacaacgcgttttgagtatgatgaataacagacttttcgtcaggaaacatgttttacagccttccctgtcagcatcttcggatgaacgattccgtcaaattcaccgtccgcggaaaatggtttcgtgctgatgccgatcaggcatttttcacaagcgatcatttcgtcttttgttaaaatcgtgacgtaatccggctttaaacagattaaaaattgattgtcctgaccgacgcccctgtatggaatcagcctcagcttatccgcatggcggaacgaatcatcaagctgctctatcacttcaagcggactggcggatttgatgaggtccgtttccttttcgctgagaatcggagcgaatttgtcaatgtgaaggatcatgaccggcgttttcgtcagcggatcatacagctgattcccggaatccaccaatcctttcgcgcggattgtctgtccgctgaattccgcctgcaccatgacaagttcatcgtactgaatggacttcgtctcgatgtcttcaattctctttttcgaaaaaaaccatatggccggaaatccgataactacaaacatccagctgatcgggtcgccgaacccggtctggcttgtgaccattacgccttgctgcacaattgattctgtctgcagcagggaatgtacgccgatcattcccccgccgacgagaaaagtcgcgaaataaaaggcgaacaaattttgaaaaaagtatcggaaccgtttaaagccaaaagccgcaagcacgatgactactgaaaacgccatttttcccgccggatgctccacaaagggagaaacaggcgtaaacatcagaagcacaatggctgacccgatgaaaccgccggcggccactcttctttttttcacctggcgttttaaaataaaggcggtcaataaaagcaaaagagaatcaaaacaaaagttcaacagccaaatgacatccagatagattttcacatctgacccctttcctcttttgtcttacttatctgtttctctctcttgtttcataagtataaagcaagctctgtgggaaagtctgtcaattaatgttgagggtaaagtacaatttttaagggataaccgttttatttgtcgagggccgaaagggttgatttcctattgtccgcttcaactaaaaaagcgctgccgtgatctggcagcgctctgttttactcattgatataaagttttcctttagccgtctgtctcgtttcatttccgtagtcatctctagcgataacgtcaatttttgctccgcttgctttgatggaagaagtcgccgtccagtaaccctcatatcgtcccggagaaatttctctcagcggaagctctgttgcgttttggctccctgcccgggcgtttgtcagaggcagacggataacgaaggaagcgtctaatttctttccgcttgaaaaagcgattttcactgattctccggcttttaattccttatccgctccgggaaccaatccggaaatgacgggagcattgtaattgacatcgatcaccgtctttttcgttgttttgttacccgcttcatctgaggccgtgaccttgatctcattgctgccgttttccagaagggttctcgcttgataagaaccgttattaacttcagctttttttccgttcacctttacccattttaaatgggcgtcgtgcacttttccttttacggtcactgcttctttatttgttttatcaccgtttgccggactgtcaatcgtcacatccggcttatcctcatccagtatgaccgtgacagggcgtgactcatcggttgacccgctgtctgtcacagatgccgccgtcagccgattggcatcttcagtgagtgtgacgccggcctggaaattgccgtctgcatctgctttcgtttctgcggcggttttaccgttattggtaagacggacagcggtttttggtgaagccgttcctttcaccgtgactgacttcttgtttgtaaatgaccggtctttaggcgacgttatgtcaggcacagaagcttcgtagtcgaccaaagccctgatcataaagtttccgtctgatttatcggttttagaccagcggccgtcgaggtattgccagtttctgttcgagtacggactgccgtcatcagatgacagggcaggtgtataaggatcgggtttcgtctggcggaacacaagataaaaatcctttccgaccgcgattccttttgagctgagatccactctggtccattcgccgtttcgaagcgcttcagcttggaacgggccggcaattttgctgcccggagctccatcagggccggatgcatcatatacttctgcttgaaattcggtaccgcccggatcaggccagtcggcgccccaaaatttaaaaaggcctcccgtcagcataccgtgttcttttccgtctttgagcgtcatcttaacggcagatttgctgccggctttaaaatatgacagcgcggcttcttccgttccgttatcataggcaatttccccttcataaccgatatacggcttaagcttgacgtttttttcagcatctcctttgatgtcaacggaaaattcgctattgtaaaagccttttgccgctactttgattgtgtaggagccttcgtacgccttaagcgaatattcccctttatcgtttgtcaccgccggttcaattgcggcatcctcagccacataaagcgcagccccttttaccggttcgcctgttgactgattggtgatggttccttttagcgtgccggacggcatttgctccagtgtaaagtctgcctgtgcggttttgtccgattgaatagaaacttgtttcgaagcggacttaaatccgtaagcctcggctttcagcgtatagcttcccgccttatgtgacaggctgtagcttccgcttgcagggtcggaatatacggatttccccgtctcggcgacactgatttgcgctctgagagggaggaggtttgtttcacgtttcactctttttccgggtgatttcactgccggtttggcctgtttcggactgacggcttttttcttcaggtggccgggaggtgtttgtcttttgtgtttactttttttagccgccttgccgagagggctgcttgaaagccggacatcatcgatataccatccgtcttcattgagtacttcgtcagactgcatattaaacatgagctttatgttttggcctttatacgcagataaatccgcctcttcatcgttccatcctgcggagtcaccattgtaaacggccgcctgctcccaatttgattttccttccggaagaacgaacacatacccgtaatcaaaaaattcttcgagcttgtgccagcttttaaattgcaaaaacagccgtcctgtttccggaacttgaatcggaggcatcaccaaattcatgttggctgaatcggcataagggccggacagattcgtcgcatacactttatctccggaaaatgcggtgccgggccctgaacccgggataccccattcccattggtcatgtgtcccgtaactggaccagcccgccggctgtgattcaaaatcctctttgtatcccgccgtaatgctcggtttcacgtcagcccggtacgtatcagattctacagaatgacctccgaaatcttttatggtccatttataacttaccttgcttcccgttacatccggaatctccgcctggtatgttccctttttttcatcaccgcttttttgaacggcggctgtcgttttccactctccttcatcaaactgataggaaaggatgacttcagttacgcttacatcgtcttctgctgtaaccgttaacggaaggtttgcccctttgtaagccgctgagaccggttcatggtgaaagctgggcggattgtgatcttcgcccgcagaagagaccttgccttctacgcctccgattccgtccgttacggcagaaacggcatcaaaagcgttaacgagaccgtggccgtaaccgttattcggtgattccggaaaaacggaatctgtcagcttttcggcggtgcgcgtcaaaacgtcttccatttcatcgaccgtaatagaggcgttcgcctgccttaacaaagccgccgtcgccgccacatgcggcccggccattgaagttccgtcccagccgccttcgtatgttcctccaggaatcgaagaacggatattcactcccggagccgaaatgtccggttttgtttcatgatacggtgaggggccttgaagcgagaaatcagcgagtttcttgtcgatgtcagtcgcacctgtcgcaaatgcttcaggataattggccggatttgcgattgaccccggtcctcccggtgtaaataagtcttcatttcccgcagagaattccggaaaaatccctgccgctctccacgcattcaccatatcgcggtaccactcgtccattcccgaaccgcctgcccaggaattattaacaacatccggcgccatctcgggatggggcgtgccgtttttatctttaggcgcgagcacccattcaccagcatccaaaatatcggcatcagttcctccgtcatctgaaaatgcttttactgcgatccatttcgcccccggagccacaccgatttgatttgagccgtcaggttctgaacccgtcatggtccctgttacatgagtgccgtgttcaagatcatcgtagggagcgtctttatgggacacggcatcataccagttcatttcatgattcggcgctgcgggattttcaggatcgtaaccccggtatttttctttaagcgccggatgatcccactgaactcccgtatcaatggaggcgacaaccgtgccggttccgtcgtatcctgaagcccaggcctgcggcgcatcaatttggctgatattccattcgatgccttcctttgctttgatctctttttgttttttcttcatttgaaaaggagcttttgattgtcgttgagtaagctgacgtttttcattcggaagaactttttctacttcaggaaatgaggcggctttttccattacctctttcgaagcagtgactgccattccgttgacaatataataggaatggatgtgatcagccttgcctttctttttttgtttttccaaatatgttttcagattctgctgcgcatcatgagccgccagttttaaagaagaaacgacggctgaccgcttttgatattcggtttttgctgcggaaagcgattgagacttggcgtttttttctgcttctttgaccgcttttttcgtattggctttctctttaaatttgataagaaacgtgactttatcatttttttcaaaacgcttcttgactgaatcggaaatcttatgctgaatgctcttagaggaagaaagatctttggtgaaagaaactgcccccggtgtgctgttcgctccggctgcacccggaaacaacagggaactgacgacaatcgtgcttaaaacagagcctgtccatctgtttcttgtttttttcttcaatcgtatccccccttatttggtaacgcctataaaatgtgtatccctccttcataattggaatcgtttgtcatttcgatgctgtacgttaaatgtagacaatcttccatccagatattgtcgcattctgtagaaagccgtatgaaactaaaaaacaatcaattcgtcataggtataaagtttcttttttcactgtatagatcatggggataggaaggaagactgtgcacaaaagaaaaaggacaaaaccatgtggtcttgtccttttttacatcagccgcgtttgttgcggtttcttaaaaatgtaggaatgtcgagggcatcatccgccggctgtgatgtatggcggttcaccgtgttttgatgctgtgtttcttctcgtttcggctcacgtttcgcagcgttttggctttgagacttcaatccttggtttaaagtcggacgctgcggttttgagtcatctttttcctgttcgataaaaccggtcgcaataacggtgacgacgatttcatctttcagattttcattgataactgaaccgaaaatcatgttgacatcagggtcagatgcagaagcgacgatgtcggctgcttcctgcacttcgtagaggctcaggtttgtacctcccgtaatgttcatcaaaacaccttgcgctccgtcgattgccgcttccagtaacggactagagatcgcctttttggcagcttcagcagcacggctttcgcccgtagcgatcccgatacccatcaatgctgaacctttgttggacatgatggttttgacatcggcaaagtccaagttgattaaaccaggcgtcgcgatgaggtcagagataccttgcaccccttggcgaagcacgttatcagcttcacggaatgcttcaagcatcggtgtgtttttatcgacgatttcaagaatgcggtcattcggaataacgatcagtgtgtcaacggcttctttcattgccgtgataccgcctgcagcctgcagctgacgttttcttccttcaaatgtaaacggtcttgttacgacaccgacagtcaaagcgcctaagtcctttgcgatttgcgcgataaccggtgcggctcccgttccggtaccgcctcccattccggctgtaacgaacaccatgtcagcaccttttagcgcttcttcgatttgttccttactttcttcagcggcttttttgccgacttccggattcgctcccgctccgagaccgcgggtcagcttttccccgatctgcattttcacttccgcttttgacaggttaagagcttgcgcgtccgtgtttaccgcaatgtactctacaccctgcacttcattttcaatcattcggttgaccgcgttattaccgccgcctcctactccgattactttaattgatgctaagccgtctatgtttgtttcgaaatccaacatgctaaatcctcctaatctgccgaatgactatcaatctattcccaaaacatgcttaatagttttttcattttgctcggtttgttgtgttcggcttgtgttttttgttttgcttttggacgctgctgcgcctctggccgctgatgatgttcttcttcgtgagagaccgcgatttcctgcacggcttcttccggcatatgaaagcctatttttcttccctgaattctggcatttcggcaggcaaattgtatcaagccgacacccgtcatatactgagggtctcttacaccgatataattcgggcttgcgacccttacattgtgcctcagcacttcctgtgccaatgaaagcactccgggcattgcggcctgtcccccggtcagcacaaagccgccgggcagatctgtaattcccatatgctcaatttcggctgcggcaatctcaagaatctcttccactcttgcttcaataatattggcaatttcctgctgtgtaaaagattgcttttgatttgttcctatgacggtgacttcaaatacttcatcttctgaagcctcatcgtagaatgcatgtccgaattgtttttttactctttcagcctcttcggtggaagtgcgcaatccgatcgatacatctttcgtgatgttttcgcctccgagcggaatgacggctgtctccttcaggtgcccctgttcaaataccgccaccgtcgtcgagccgccgccgatatcaatcatggcgactccgaggtttttttcgtcttttgacaaagccgccgaaccggccgcaagcggctgcaggcaaatatcagtaatttcaacgcccgctctctccacacagcgaagtaagttatgtaagatcgttttggagccggtaatcagcgtgccttctacttccaggcgcacgccgagcatttttttcggatcggtaatttcgtctcttccgtcaacgataaactgtttcggaacgacgtctacgatcagctgctcatgcggaactgacacgacctgtgccgcttccattaccctgcggacgtcttcaacgtgaatttctttgttttcactggaaacagcgacaacgccgttcgtatcttgaatatgaatataatttccattaacgccgacaatggcttttttcagcggaaaacctaccattctttcagcttggtcaaacgcttttcttatagaatgaacggtttcatctatatcaacgattgagccttttttcaacccttcagacggtacatttcccactccgataatgttaagggaatcatctgtcatttctccgacgatcacttttgtattggacgtaccgatgtcaagactgacgtaaagttcattgttgttcattctatggcacctcctcacatttcgatcaaattctattctattatttgcggaacaacaatacaatgaatgtggctttacaagtgtgtaacaaaaacaacagcatcaacaaattcttatctgatttctcacaatttatgtttaatgaaactattcgttatattctatgtatatcctcttttatatcgtattttttttatttttttttagagaaggcccaccttaccgtaagatttcttgtcacggtgccatactgtgcaaaccagatgcaaatatacccgctttccattagtctacactaagatgaacctccagaaaagctatagatattgccagaaacatccgaaaaaagaagaaacaggaggaaaattccaaatgcaatgctcattgcagaagacacgcccattgcattgagaattttccgcttgtccggcagccatatcccgggcaaaaacaaacatagtcataatgattccgctatcggttatatcggctgccccgctgattgtaatagattcttttgaaccaccttgaaattagttctttagaactattaatcattttcttttttcttgccggatttacctttgttaaattcttcaaaatacgtagcgacttctaagtggataatcccctttttcccgccgtccagctgggaaacgatagaaggataggtcttcatccggccggcaaacgttttaatagaagcggtaactacatacccgtcgttcatatacagcttgatccggtcctgatccatttttaccggtgtataatagatttcagaaatcgactgcttaagcgaaccggaaagcttatcaagctgctccgccattttgatccgctttttcgcgtttgtccagtcaaccaaaatcgggcccgcgtcatccggcgtgacttcgttcggcagcacagtgccgttttcgagcacttcataatacacatcatgtcgctgcagatacgcgatcgtcttatattcttcaatgtgaatgctgactttgttaggaaatacttttgaaagttccgcctttttcaccagcttattctgctcaatcttttcttctgtttgtttcttgttcagactccagaactcggtttgtccgttatgtatatcagaaagcgcgttgatctcttttacagacacgttttcgtttccggaaacggtgacagaagacactttgctgatcggcatctgcaagtacacgatgatcagcaccatcataaaaaagagcacaatgaatgaaatcagccggcggtttgctttttgcttccgctgctctttgattttcggaatccgctcttcaatatttacgattttttctctttcatgatttgggttcactgcctgtccacctcactaagaatgaaacagcttgacattcgtctgattgaaaaacaaacggcatgctgtgatgccgtttgacatttgttaaaagtatatcacatgagctcatgtaatcagagaaccttttaacgattccctccgatgatttcaacttctgtatgcatgtcaacatcatactgctcacggattgtctttttcacatattcaatcagatcaagaacgtccttggcagtcgctccgccggcattgacgataaaattcccgtgcatttcggacacttttgctccgccgatctgatgtccttttaatcccgctttttcaacgaggtttccggcatgattcggcagcggatttctgaatatgctcccggcgcatgggcttgaatacggctgagtgttttttctgtaatctttgttctgctgcatttgcgccgtaatggcttcccgttccttttgctcaagctgaagaactgcctcgagacagacgccggggcgttttttctgcaaaacagacgttctgtagctgaaatccatctcttcgttcgtcagccattcgattgtgccgtcttcaaataagatacgggctttcacaagaatctcactcatatcagatccgtgcgccccggcattcatatagacggctccgccgattgatccgggaatgcccgctgcaaattcgagaccggacattccttttttactcatggaagtcgcaagccggacgaccgaatagccgcctccgactgtcacctgatcaccgtcaatctccaaatgatccagacccgctcccagtttgatgacaactcctcttatgccttcatcaagcacgagcagatttgaaccccgtccgataaccgtccatggcagatcatgtttcttcacaatatccataatatctttgaccgcttccacacggttggggatgatcaaaatgtccgccggaccgccgattttcatcgttgtatggttcgcgagcggttcttgttccagcactttgccgacttcgcggtctcttaattcctgaattacgttctccatcataaacctccgcattccatttgctctatttttttatgtcttccatgatactgtacagtctggctgccgcatccggaacaccgagtgattttgtccgctcactcatgtcttttaaggtttcttcattcatgacgattttgtccagcgcagcgatcagtttttctccggtgagctcggtttccttcagtacgattgcagcgtcatgctggctaagcgccttcgcattgacttcctggtgattggctgtcacatacgggctcggaataagcacgctcggaatgccgagagcggtgatttccgcaatcgtcgtcgctccggctctggccacaatgacatcaattgattgtaagtactccggcatttggtgcaaaaacggttttgtcaccatattatcagcggcttttccgcctttcagctcagccgttaccttctcgtaatgcacttccccggtaatataaagcacttggtaaggtctcgttttcaattcttcctgcatatctataacggcacggttaatgggagccgcgcctctgcttccgccgaaaatgagcaccgttttttgattgtctttcagcccgaactcagttaatgagcggcctgtcttaattgagacgacttcagaggctctcgggtttcccgtaaacacaactttttcagcaggaaaatgcgattttgcctcttcaaagcaaattgccaccttattaacatatttcgagagaaacttatttgtgatgccgggcaggctgttttgctcatgaatgatcgtcggaattcccatttttgccgccgcgtatacgaccggaccgcatacatagccgcctgtaccgataacggcatccggtttaaactcttttaaatatgatttgcttttcttcacgccttttaagaaacgcatgacggtttttacattttcaaaagaaagttttcgtttgaaacctgtaatttcaatggcacgaaacgggatattttcccgttcaacaatttttttctcaagaccgttctctgttccgatatacaaaaattccacatccggatgccggcgctgaacttctttaataaaggccagggccggataaatatgtcctccggttccgcctccgcttactgcaatacgcattcgtatgtcccccttaatcacatagcgataaccctgttttttaggacagggttattgatgttgtctgtttttttatagataacgaataaatcatgagtgatgaggcaagatacagatcaatacctcgagtaccggctgacatttaaaagcacgccgaccgctgcgagcatcagcgtcagtgatgagcctccgtagcttaaaaacggcagcgtaattcctgttaccgggatcagccccgtcacaacgccgatattaatcatgacttgaatagctatcatagaaataataccgatggcgacaaagcttccgtataaatccggcgcgccgagggcaatcctgacgccccgccataataaaatactgaacagcagcaatatgagcgaaccgccgataaagccgagttcctcagataaaatagcaaaaatgaaatcggtttgcggctccggcaggtaaaaaaacttttgccggctttggccgagccccatcccgaacagaccgcccggacctacggcatagagcgactgaatgatctgaaatccgcttccaagcggatcctcccatgggtttaagtaagaggtaatccgtttaatccgataaggagcggacagaactagtgccgcaaatccgcttaaaccgatgagtccgaggaacgcaaaatgagcgattcgcgcaccggaaacaaaaatcatcacgatgcacgtgcccaccattaccgtccccgttcccaggtctggctggcacataataataataaatgcagaaaacacgattccgagcgcgggaacgaatccgcgtctgaatgacgtaatattcttctgtttttcagaaagaaatttagccagaaacgcaatcatcgcgagtttcataaactccgaaggctgaatgctgaacgctcccactccgatccagcttcttgaaccgttccgcaccattccgactcccggaatcagcacaagtacaagcagaaaaaaacaaatgatcagaagcagcttcgaccatgtgcgccatgtccaataatccacattcattatgaaaaacatggcaatgacgccgatccccgcaaacagcagctgccgtttcgcgaagaaaaacgagtcgtcaaatttataatccgcccataccgcacttgcactgtagaccataattaatcctattgttaaaagcaataacgtaatgataactaataacaaatcaggcgctgtttttttagtagtcaaagcaatcgacaccccaagcataagtcatttagggctgccgatgaacagagacaagcccttacttaagcatatgcacggcatctataaacatgtcaccgcgttcttcaaatgttttgaactgatcccagcttgcacacgcgggtgacaagaggatgacgtctccttcatttgagagcgcaaacgccgcagatactgcttgttcaacattatcgacacgtttgacatgttgtattcccagctcattgcccagtttttctatcttcggcgctgtctgtccgaacgtcaggaccgctttgacattgtccatatacggtttcaagtcgtcaaaaccgttgccgcggtccagtccgcctgcaagcagaataaccggtgctttgaacgcggagagcgctttgcttgtggccagaatattcgtcgctttgctgtcattataaaatctacgattctggatcgcagttacatactgcagacggtgtttgacaccggtaaagcttgtcagcaccttctgaatcgctttattagacgcgcccgccgtttttgccgcggctacagcggctaaaatattttctaaattgtgcgcgcccggcagtacgatgtcatcaacaggcagaatcgcttcatcgccgaacatcagcattccgtctttaatgaatgcgccgcttgacagttcctggtgaactgaaaacggaacggtgccggcttttccgctttcggcaagccgcacgactgtttcatcgcttttattcacgatggccgtatcactctcaagctgatgaagatacacgttctgcttggctttttcatagttttcacggctgtgatggtaatccaaatgagcgtcgaacacatttaaaatcaggccgatttcaggtctgaacgcatgagtccccataagctggaacgaagaaagctctgtgacgatccattcatcaccatcagcatgataagccacttcactggcgacagtgccgatattccctgcgatcagcgcctttatcgaatcagctttcagcatttcataaatcagggtcgtcgttgttgttttcccgtttgaacctgtaatgccgatgaattttgcattggtgatataatacgcaagctcgatttccgtccagaccgggatgtctcttctttgcgcttcctccaccatgatattttcatacggaattccgggatttttgatcagaatggtaatgtgatgctgatcaaaaagtgacgtcggatgctcaccgcagatgacttcaattcctctttctgcaagcctttgggcaggttcgttttcttcaaaggctttttgatcattcacgacgacgttaatgcctttttcatgaagaatcgacgcagccgcatatccgcttttcgccagtccgaggaccagaaagttttgtttttgcaaaaaaagttcgttttccacttataaccacacctcgatgtaaattcctaaaacggcaagcagcagtcccgcagtccagaatgtgacgacaactctccattcagaccatccgaccaattcgtaatggtggtgaagcggactcatcttaaagattcgttttcctgtcgttttaaagctgatgacttgtaagataacagataaggtctcaataacaaatactccgccgataatgacgagcagaatttcaagcttcgtcagaatggcaacggtcacgatcgctcctccgagcgcaagcgaaccggtatcccccataaataccttggcgggatgggcgttgaatacaagaaaaccgagaacggcgccgacaacggcaaccgagaaaatcgcaacgtcatattgtgactggttccacgcaaggatggcgaaagcgccgaatgcgatagccgcggtaccggacaagagaccgtccagaccgtctgtcaggttgacggcatttgaacctccgacaagcataaagagaacgaggataaagtatccccagccgagatcgattgacagatgtgtgcccggcaccctgatgccggttgaaaaatggcaataatgatatactccgtaaaatacaatggcaataatgatctggccgatcaatttctgcttcgacgtcaatccgagattccgtttcattactactttaatatagtcatccagaaagccgagcaggccgtatccgatcgtgacaaacagcagaagaaacatttccgcgctcagatgcgaaaatttctgcgtcatgacaatcgccgtaatggcgatggatacaataatcatgaccccgcccatcgtcggcgtccctgattttttcatatgtgatttcggcccctcttccctgatactttggccgaattttaaacgtcttaaaaacgggataagaatcggagatatcagaacactgattaaaaatcccattattattgtaaataaaatcacttgctcaagcattgctcttttctcctcccgtttcgttcaaacgacatacgtatttatcatattcacattgtgtccccgtaattcttttcatttccctcattctaacactctttcctgttttactttttattcagctcaacaatagctcttcccgctacttcggcgtcatcaaagtcgaatgtttcattgccgatctgctgataggtttcatgccctttcccggcaatcagaaccacatctccctttttcgcgttggcaatggcaaaaaagatagcctgctcgcgatttgcgatactgtgatagtaagtgccttctacccctctttccatatctcttaatatggccagcgggtcctcgcttctcgggttatctgaagtgaaaatcggttcgtcggcaatccgcaccgcaatttccgccattttcgggcgtttcgttttgtcccggtcaccgccgcagccgacgacgacgaaaagcttgccctctgtcatgtctttgcatgtattcaggacgttttccagactgtcaggcgtgtgcgcgtaatcgacgaccacaggaaacggctgattgtgattcaccagttcaaaccggcctctgacaccttgcagctcttcaagagcgcttgtgatcgtatcaaacggcagacccgctgcgatcgctgtcgccgctgcagccagtacgttatacacgttgaagcggccgacgagtgaaaccgtgatctgctttgttccttttggcgtaacgagttcaaagcttgtgccttgcgcagagatctcgatttgtttcgccatgacatcggcatcattctcgattccgtatgtaaggatgtgcgccgccgtcactttttcaaaataagcactggctttgtcatctgcgtttaaaacggcccgcttcggcttttcgtgattaaaggagccgcccagctgggaaaacaggaggcttttagcctgtctgtagtcttccatcgtcttgtgataatctaaatggtcctgcgtcaggttcgtgaatacggcgatatcataatcgcagccgtgaaccctgccgagtgacagagcgtgagaagacacttccataatagctgtgtcaacatgctcatcattcattttcttgaacgttttttgcagtgtgacgctttcgggcgttgtatttttgaccgggaatgtctcatctccgattttaatgtacatcgttccgattaaaccggtctgtcttcccgcttttttgaaaatctcatcaaccatgtgcgtcgttgatgttttgccgtttgtgccggtgatgccgataagctgaagctgctttgtcggctgcccgtaaaacacgtcagaaagaacgctgagcgcccgctgtgaccggcggacaataatgacaggaacatcgacgtcaagctctttctcggcaacgatggccgctgcgccgttttctgcggctttttgggcaaaatcatgtccgtctaccgtatacccttttatacacacaaaaagactcccttttctcacttccctggagtccatctcaattgaagttatgtcagggtcatgaaagtcattttgaacaggttcggccattaaatatgtaagcagctttgtaagtttcattgtatcaaacctctcagaaattctattcattcttttatcatgataaccgttttaaaagtcagaatggcttttaaacatacagttcatattttagcgtaaataaaaggatacatccagttaatcttaaaagttatcttctttttttctctttatgataagaggcagccgaaaacaatcggctgcctcaaaaagactcattcttcactcaagtaaacacggatctttgagccttcttttactttcgttccggctgcaggtgattgtttcacaattttgcttccttttcctgaggagtcaatattcaaattgacaagcagcgactcaagatcagagacagacatccctacaacattcggaacctctattgtttttgtgtcgttccattgatattttttctcgatttgattttttcgcggtttcacgccgagctcaggcagactgtctctcatcatatttccgacaatcggcgcggcgacggttcccccgaattgaatcgtacctttcggattatcaaccgcgacatacacgacaaggctcgggtcatcagccggcgcaaaaccgataaaagagacgatatggttattttcgagatatttgccgtctttgaccttttgtgcggtacctgtttttccgccgacgcgatatccttccacgaaggcattccgccccgttccctgagcgacgacgctttctaaagcatatctgatctgctttgacgtttcctgggaaataacttgccttttcgcaatcggcgattgtttcttaacggtttttttcgtaacgggatcaacccactctttggcgataaacggagtataaagcgttccgccgtttattgctgcggaaacggctgccacctgctgaatcggcgtgacggaaaccccttgtccgaaagcggttgtcgcctgttcaaccgggccgactctgtcaagcggaaataagatccccgttccttccccttgcagatcaatgcctgttttctttccaaagccgaagtccttaatatattgaaacagcttttgttttccgagccgttcccccagctgtacaaacccggggttgcaggaattttgaacgacttcaagataagattgcgaaccgtggccgccctttttccagcatcggaggcgggcgccgtcgacctcggcaaaccctttgtcataaaagtggtctctttgcaagtttactttttgctcttgaagagccgccgcaagcgtaataatcttaaaggtcgaacccggttcatatgtgctccataccggcaggttccggttataaacggacggatccaccgattgatagtcagccggatcaaaatcaggacggcttgacatgccgagcacttccccgtttttcggattcattgcgaccgcaatcattccgtccgggttatatttcgccgctgcattgtcgagctctctttctataatcgtctgaaccttggcgtcaatcgtcagtttcatatcaagtccgtctttcggaggggtgtaatcatccgcttcatcaggcattttcttccccttggcatccgtataaaattttacggatcccttgacaccttttaagtcatcatcataataagcctccaatccgagaaggccttggttatcaataccggcaaaaccgagaacatgggacaaaaagcttccgtacggataatggcggatgctgtcttcagccacataaaccccctttaagtcgagcgctttgatttctttcgcttttttattggaaattttccgcccctcgggtgagattttttctatggaggttttcttagtaatgtgtttgtagaccttctcttccgacatatttaaaactgacgcgagaagcttgcccgtttttatgggattttggatctggcgcggtacgacaaagacggtcggcgcgcttttattagtagccagcttcacgccgtttcggtcaagaatctctccccgctcaggctcaaacggcaaattccggctccaggaatccttagccagtgaagtcagcttttctcccatcacaaattggacatagcctaatctgctgtcaatgatcaaaaaaatgattacgccaaaaagcaaaaccagtaataaacgttttcgaaccgttacatttgaaacgcgcaagggaccgtccactccttatttaggcttgtttcaatttatgcctcagcttggacacatagaacggcggcgtataaaaaagaagcccgcgggcatccgcggacttctctgtcccgttaatcaggatttttaaatttcaccttgatcacggtattttctttcagttctttgccttttttcacactttggcttgaagcgtaaccttcaccgctcacatcaatgtgaatacctgatactttgctgaattgaagcacttcccgtctcgaccatccggacatatccggcatcgtcatctttccgtctgtttttaagaagattttctgattggtgatcacatcttctccagctgtcggatactgctcttttacggcaacatcgctgccaatgacaatcggtgtgagatgttcatttttcgcttccttctcagcgctcttgaccgtcttatctgtcaggtcaggcatcttttggcttttcgtttcttcctgaccggaatctgttttttccgtcggttcgatattcaggtagtggaggctgtttttcatcgtcgggttaaagatttccgcgacaggatcagagctgctttgacccgcttttaattgcggctgctgcacggctacatagatgacgagcttaggatcatttttcggcgccatgcccatgaatgaaaacacatagttgctcgttccctttaaatatccgcccgtcccggcgatttgcgcggttcccgttttacccgcgacgtcaaatccttcaattttataaggttttcccgttccgatgtctgacgtcacgacttctccgagcaggttccggacttttttcgccgtatcggctgaaatcggcgtgcctacttgctctggttttgtctgcttgacgacttttttcgtatcggggtcgacaatatgatcaatgacgtaaggtttcatcattttgccgttattggcaatcgccgtgacggcctgaagctgctggatcggcgttatcgccgatgcttggccgtaagccgtagacgctttgtcaaaatcatatttgtagttaattttacttgatacttcaccgggcagatcaacccctgttttttgatagagcccgaatttgtgcaggtactcattaaaccggtcaaaccccagtttttcgttggccagtttggcgaaagcaacattcgatgacctcatgaggccgtcacggaagcttgtcataccccagccggcgccttcgttccaatctttaacaggtttgcctcccactttatatgttcctgatttatatttctcgtttgcagaaaacacattttcctgaatcgccgcggcaagcgtaaagatcttcatcgttgaacccggttcatacgcgtacgacactaagtcattgtaataattggtgacgtttctgatattcgggtcaaaactcggacgctgccccatcgcgagcactttgcctgttttcggttctacgacagccgccataatttttttcggtttatatttttccgctactttcgtcatgctgtcttctaaaaaggtttgaattttctgatcaatggttaaatatacattgtcaccgtttttaggtgcggtgattttttctttgctgttcggaagtttccagccggatttatcactttcgtaagtgacagatccgtcgcgttccgtcagatagttattcagtattttttcaagccctaaagagccctgtatctcgtttgttttttcattcacatcggcatagccgagaacatttgacaaaaatacaccgttcggatagtagcgcttcgtatctcttaagaaagaaatacccggaagattcattttttcgatcttttgttttttcgcataagagatatcgcggccggctgaaccgaattccacctgcttcgcgccatccctgtttaagatgtccagaatctcgcttttatcaagattgataacggtcgccagcttttccgccgttttctctttgtctttgacatgctgaggatgcttcttgtcggtcgtcatctttttatcaagcacggcaatgagcttatatgtcgccgtgtcctctgcaagcactttgccgttccggtcaaaaatagagccgcggctcgcttctatcgtccgctttttttcgtgctgctcggtcgcttttgttgcaagttctacaccgtttgctttaccggttaattgaatgtacgccattctcccgagaatgacaaagaaaaagagagcgaaacaaatactgagtatcgctgctcctctgttcataaacttattttttttcggcatgggttatcattcctgtatgtttttcacttttttatctttcagattcaaaccgtgctttttggcgatatccatcaggcgttgcggctggcttaagtcagcagccgtcttttcgagatcaccgatctgcttattctgctcagatactttctcctccagtttttgcacctcaatattggattggtacgccgcgtatgcctttgatacgataaacattgatgtggagagaacggcaatggcaaacaggacgagcagcaccttttccccgagtgtaatggaagccctctttttgacaatcacctttttttcgggacttatcactggccgttgttgtttttcctgctggtaagctaagttgctcataggctgatgacctcctttaatgttgtcatttgctgcccgttattttcgtttctccgcaatgcggagcttcgctgaccgggcgcggttattttcttcaagctcctcttttgatgccgtaatgggctttctcgtaatcagttttaattccggttcaaattcttccggtatcacgggaagacccggaggcagttcgggaagtgatgatttttccttgaatgtcgtcttgcacattctgtcttccagcgagtgaaaagtgatcacagacacccttccgcccggcttcagcacctctatcgcttgcaagagggcctcttcaaatacttgaagctcgtcgtttacggcgattcgaatggcttggaatacacgtttggccggatgacctccgcttcttctcgccggagccggtatcgcgtcctttattagatcgaccagttggccggttgtttgaataggcgatttttctctagcctcttcaatttttcgggcgatctgcttgctgaatttttcttctccgtatttaaagaaaatcctcacaaggtcctcataccgccattcatttacgacttctttcgccgtaagggcggccgactggtccatcctcatgtccagcggtgcgtcatgatgatagctgaatccccgttccggtgtatcaagctgcggagaggatactcctaaatcaaataaaattccgtcaacactcgtaatgccgtgttcatgtaaacactcttttaaataacgaaagttgcttttcaccagaataagctgtcctttgtattcggacaatgttttctttgcgttttcaagtgctgtgtcatcttggtcaaaggcgatcaagcgtcctttttccgataattgctgcaataaatatgtactgtgcccggcgccgccaagggtgcagtccacataggttccgtccggtttgatatttaaaccgtcgacggtttcacgaagaagtactgtcttatgctgaaacatttgtgtcggtcccacctttatcaggaataaattgaattgtcagttgttgttgtgatgcacgaagatccattatatatcaaatccaatcatgttttcagcaatttcagcgaatgaatcttcttgctcttctgtgtattgttcccatattaccttactccacaattcaattcgattggaaaccccgatgacaacacattctttttccagttttgcgtaattcagaagagatgacgcaatattaacccttccctgcttgtccagttcgcattcggtcgcaccggaaaaaaagaatcgggtaaatgcgcgggcgtcttttttggtgagcggcagagccttcagcttttcttcaatcagcttccattcattcatcggatagccgaaaaggcattggtccagtcctctggtcagcacaaactgctcaccgaggccttctctgaattttgcgggtacgatcatgcggccctttgcatcaattgtatgccggtattcacccataaacatgataaggacccccactttctcccctaaactcaccactatccgccacttctctccacaacctcattttacactgtttacacataaaaaaaaaccctgaactattcagggttctttaaaactttatttcaaagtttgacaatctgatgttggttttgaaaagaaaatggcagatgtttgaaggttgtgaagaattttggaccgtagcggttcagataatacatcacattccaaatccgttcctgcggagcgccgagcggtctgatgctgttttggattctttcatagtcacgcagcacaaagccttctttttcttcaattcttttcgttaccgtccgttctaaaaacaagagctgatcttgaatgaaggcggcattcttctgtaagagcggctcaaggcttgaatcgaccttcagcgcttcgtcccttgcgcttttatggatagcttcaatctgcgacttcgcctgctccattacagaagtaaactcttccggaatctgctcttcaaaataattgtctttcaggtgtccggtgccgtgttcgatcgcttcctgaagctggatattccgttctgaaagcttcttttcaatatggcgctcaagaatcgtaatgttcagtctcggcactaccggcgtcatgcgaaagcccattaatgagaaagcctgcttcagctcaccccaataattgatctcccccggtcccgcgataaacgccagagtcgggatgagaaactcctgcataagcggccttgtcacaacgttattgctgaaacattccggtttttcttccatatgggtatgaagctcgtcgttcgtccacttcaggtcaagctccttaatgacaaaaacgccgttttctttttcaattaagaaacgctctccctcgtgttcgtaaaacagattggcctgatctttgtccgattcaataatcgggtgataaccggcttcccgcataaaacactgctggtctgaaacggctttggcaagctcatgattgtgttttaaaatctgctgaaacatacccgtttccagctttttaatccccggatctcccgagttcatcagaataaggccttcttcttgaaacaagtcggcgatcaacagctcaaaaaagtcggtgaatgtctctgatgagcgtaaacatcgcttcacgttttgaaggagtgtgtttgtgtgatccgtttcctcaaaagcagcgaacacttcatcaatccaagccgcgcatttttcctgatcaagctcggttttagccgccgatgtttttttccagtacgactgcggcagtttctgtttcaccggacctttattctctgttgacgtatgcacaaaattgatttcttccagatcgtgatcttcacccgccacccagaaaatcggaacgacaggaatctgtaacgcctcttcctgctgtctggcaagtacgataatggagataattttatgtatggtgtaaagaggccccgttaaaagaccggcctgctggccgcctactaccgctgcgctttttggatctctcagtttttcgatggaggcctgcatggcggcggagtgaaatttttcgtgataggaggataaataatccgctaattcctctctggcaaacggccgcgaagacaagtcatgaagccgcttttgccatacgtcctctgaatgaatatcataatcaaaaaatgaagacatgttttctccatctatatagtgctgcacaaacttattttgacttttgatggaaagttcagttagctgcatctgtctggaacttcctttctccaataaatagttaggtttccgaaatgagtatagcatgttaccggaaaacctcaaaagactttgtttcagtttctttctaacgcttttatgctgcggtgtaaaaacgtgagatgaacggccggcaatccgcggctttccgcttcttttacaaggtagccgataatcgcatcaacctctgtccgcctgcctgccatgatatcgacgagcatggaagaatgatttttttccgtcagtctgcacacttcgcaaaccttgttccacgctttttctctatcggcgaggccaagtattgtctccgcttcttcaaacacgtttctcatatattttttgtaagcgtcatttcttaacagctctccgtttttcacgcgcagcaatgcagttaacgggttgatgcatacatttatgatcagttttcccgttaacagccgataccagtcgttttcatcatatacaggaaaatcccggtgcatgccggaaaagatgcttttgagcgtttccggccgggatgcgctgaatacactccatcttacggctcccgctcccgtatgttcaacggcatgatctgatatcttttttgctccgtgctcaactgtgccggcataaagcgaatgatccgtatgccaatctttaatgtcgtgtatgtgtcccatgccgttttgcaaaaacagcacattcgtcccttttatcgtctcaagatcccgcaacacagcccttagctggtgctgtttaacggctgcgattaagaggtcgaatccggaagtgaggccggtttgcgctctgcatgccgccgtacattctattccgtctttcaaaagccgtataccgcctgagttaatcgcatcagcctgctccgtccgccgcgtaatgaccgttacctgatggcgggacgataagtagtaagcacataaaaggcctaccgctccgccgccgataattccgattttcacactgtcacaccctatatctgcatttttccatattatcatagcagaagccgccgcaaattacttcaatttcgttttgagcaaaaagactggcaagcatattatagttggaattttcaattaaagcgtttacaataatggtagaacacaacaaagggggagtttgtgttgaaaatagagcgactgctcatcaactttaagacactcgaagaatttaaaaggtttaaggaatacgggatgcaggagctgtcgatgcttgaagatcttcaggataatatcattgaaaatgacagcacctcgcctttttacgggatttacttcggggataaactagtggcgagaatgagtttatatcaggtaaacggaggtgcgaatccgtattttgatcagcgtcaggactttttggaactttggaagcttgaggttcttccgggctatcaaaataacggatacggaaaagcgcttgttgattttgcaaaatccttcagaatgccgatcaggacaaattcacgcatgaaatcagcagatttctgggataagatgaattttgagcccgttaaatatgatatggcgcgtgataaaggagaaaatccttatatctggcatcccgatatggacggtgaaatgacatccggagaaacggcataataaaaaaccggcggggccgccgcccccaggccggttcattttacaggctctgcgccgattttctgtcgtcttcttttgaattgaccatccttctcgctctgtccataatgtcaattagcgctttataatcttcttccgtcatctccagcttgtttctcaagctttcattttcctcacgcagatcctcgacttctttttgcagcgcggtcagctgttctgtgagtttttctttttcatgacgcacatccgctgcggccggcgactctttaaattgctgcagaaacaaaatgacatcatcaatggacagctctttttctccttccgccctgcggatcggaggctgtttgacggttcccggcatattggcggaatgcaccccgatctgctttcttaattccttccgctgttttttcgccagttctatccctgactgatattgttttctgacataagaattccatctgaacccgcaggcggcagccgttctcgtcagcgctctgccgacttcttcaaaagcggaaagctgggtcccgccttcccgaatatgcctgagcaccacttcggccagcagcaaatcttcatcttgcgtccacgcgtcttgtctcgttatcgtcaatcgtatctccctccatatttgctcatttacctcatacatatgccgctgatagattagatagactactggggctcacaattttttcggcggaagcaggccggaggggcaaaaaaaaagaaaagcgcaggaaccgagattcccgcgcttttcttcatacattaattgcttttaacatttatgtctttgccgttgtatgatccgcatgctttacatacacggtgagacaatttcatctctccgcatgacgggcattctgtcataccaggtacatttagtttgaaatgtgtacggcgcaatctttttttcattttagaagttcttctaaaaggtacagccattattcccacctccttaaagagttaagattcatcatcttgtgttaagagctttttcagatccgcaagtctggggtcgatttgatttttcttgtcttcctcagaaatcacttgccaatccttccccacttggggagcggctccttctttttgttcagtttcacaaaagacttgcataggaatttctaaaagaatctcttcttttatgatcggagttaagtcgacgatatcgtcttcagcaatatgaacgtcctcatcttctatatcatccgacttatgaaatctaaacagttcttttgtcgcgattgtaaatggatacggcacatcaactaaagttcttgagcacggcaaaaccatttcgcctgaaatcgtaaagtcaaacgaaacttgcttggattcaatctccgcgcggcccttcacccggacaggagaaatgcggcggatgtcagaattcaattttgtcagctcatttaactcaactgtttcatcaaattcaaagctctttttcgccatttgatgaagctgataaatcgtccatttcatttgtatcacctcaggaaagcaacaaacatgattatagcttttcagaatgtttttgtcaatattttttctttacagcataatgccgccgtcatgcaatcgttgacagccggataggctatgcatacactaaacgaaacggactaaaatatgcacttcatttgcaaatgtaccacacgaagcaaaacatagcaagaaaggcgggacaaatatgaaagcagtcggcctggttgttgaatataatccctttcataacggacaccgctatcatgcggaacaagcaaaaatcaaaacggacagcagcgtcgcggcggcggtgatgagcggcccttttttgcagcgcggggaaccggccgccgtctcaaagtgggcccggacaaaaatggcgctggaaaacggcgtggatatcgtcattgagctcccttatatatatgccgtacaaaaagcggaattattcgcgcgcggcagcgtttcgcttcttcatcatttaggatgcagcagcttgtttttcggcagcgaaaacgggcggatcgaaccctttattgaagcgtctgaagcgttcagccgaaaggaagatgactgcagcctgattctgaaagaggagctgaaaaagggtctcagctatcctgccgccgcctcaaaagctttttcacacatattcaaagggcgggacatgctcgatttgtccaagccgaacaatattctcggttttcactacgttagagcgatacacacctccggttccgctatgaagccttatacaacagccagaatcgcttcccaatatcatgacgccgagcttcccggagataacagccggatagccagcgcaacaagcatccggagagcgctgatagaaaaaggaacggcggccgcaaagagctttctcccggaagcatctgcgcgtcagctggaggcatacagaaattcatacggaatatggcacagcacggaagactatttttcatatgtaaaatacagcctcagcactctttccgctgaagaattgagccgaatctatgaagtggaagaaggccttgagcacagaattctgcgcaccatcagacaagcccgatcctatcgcgaaatgatggaacgattgaaaacaaaacgatacacgtggacgaggctgcagcggatgaacacgcacattctgacacggacgaaaaaagaagacatgcatcggctcttgcagccttcaagcgctccttatatccgtcttctcggaatgacgaaaaaaggacaggcgtacctgtcggcaaagaaaaaagagcttaccgcacctctcgtcagcaagctctcttctttctctcatcccgctctggatctggacatactggcgggacgggtttacagcctgccgataaaagaacctgaacgcacattgtttgagaagcaggaattttcacaagccccgatccgctatgatgaagacgaaaagcgttttttgaatgcgtaaaaaaagcacctgactgtatcaggtgctttttactttcagctgatccaaatagtcaagtgcgtcctgcatggtgtcgacagggacgatcttcatatcggacttgattgctttcgccgtttttaccgcatttttgtaatcagaattttcagctccgttttgattcggcgcaaagaaaatatcttttcccgctttgtctgcggcgacgactttctgatcgattccgccgatcggtccgactttgccgtccacgtcgattgtccccgttccggctatattatagccttttgtttcgtcaggttttgtcagctggttgtaaatttctaaagacatcatgagacccgcagaaggcccgccgatgttttcaatgctgaaatgaagatccggcttcactttcacgttccggtccgtatataacgcgacgccgattcccgctcttttcgggtcgtccgggaatgatttcagcacaatgtcaacggtcttttctttcgtgtcccgttcaatgtgaaacgttactttttcccccgcttttttgctgctgatataatcaatcagcttttcagcggattcgtatgttttcccgtccgcgctgatgattttatcaccgacctctatttttccttttgccggcatgtcagagacgactgagctggcataaatgccgttaaatgagtatttcacctgtttcccggctttttgataagcggcaatgaccgcgttttcttgggagcttttcatcatttgcagctggcgcttcatataatccgagtccgattcgccctcttcttttatgctttcgtcagggacgatttcatcgtaaggatgcactttcgcccaaagatatgtatacggattggcagggcctactttgacagtcatcaaggaaaggcttcctttttcaggatagcctccgtccaccttaatcagcggtctcagctctgatgcttctcccggctgtgtgatgtaatacggaagcttaataaatgtaacagcgattaataagatcaggatgataaacacccagcgaaaatgttttgctttcatatgagttagccctcccagttctctatttcttgtttaatccggccgatcatccggtctgcggcttcttcgcccgctgtgatcatatgatcaatgttggcaaaagaacttgagctgaatgattcaagagaagggcggatcatgacgtctgcggcaatggtctggtgacggaccaattcattttgcagtatatccatactttgcatgattacatcaaaaatatgtgccgccttttccgtttttttcacccgggatacgtcagaggcgatgacgatatcagcacccatatcttttacggcggaaaccggtattctgtcgaccaccgcgccgtcgactaacatacgtccgttcattttttgcgggacgaaaacgcccggtatgctgatgctcgctcggacggcttcggatactgaacctttcgtaaaaacaagcttttcgccggtctgaaggtcgcaggccacaatgccgagcgggatccgcagttcttctatcggcttgccgtacgtataggcatgaacgagctgcctgatgcggtctccttttaaaaaaccaagcctcggcatcgtataatccgcgtacagccgccgtttaaatgctttagcgacttttttcatcgtggccacgtcatgcccggccgcataaaagctcccgactaatgctcccatgctgctgccggcaatcatatcaattggaatctgatgcttatgtaaactggataacactccgagatgagcgatgcctcttgcccctcccgaacctaacgctaacccgattgtaggtttggccaacgcgacgaaccccctaatagacatcctatacatgaattctatggtctaaattgaacccctatgctcgtatattagtacaggatgacaaataggtacttgcccggccgcctttaaggtctgttctatattttatcatgatataaatgtcagtgtgcaattttagcatcggggaggtaagaatgaatttgtctaagtttcatacatttttgatttcattgtttttcatttttttgacggcgacggttatttcacaccctcaggcctcattcgaagcctccaaaaccggtctttccatgtggtgggaggtcgtttttccttcattgcttccgttttttattctatctgagcttttaatcggattcggcattgtcaagtttgtcggccttttactcgaaccctttatgcgtcccattttcagagtgccgggggtcggcggatttgtactggctatgggcatggcttcaggcaatccggccggcgcgaagctgactgcacggctgcgccaggataaacaaatctccagagtagaggctgaacgcctcgtctcttttaccaattcatccaatccgttatttatattcgctgctgtggcagtcggcttttttcataacgcgtctctcggcattctgctggcatcggctcactatctcggaaacatcgccgtcggcctgacgatgcgttcatacggacggaaagaagaagcggcgtataccggtaaaaagacgatcgctctcccttctctgaaggaagcatttctggccctccacaaggcgcggctttcggaaaagcggccgctcggaaaaattttgggcgacgccgtcacctcttctgtacaaaccttgctgatggtgggcggttttattatattgttttcggttttcagtcggttattatcaatcgtacaagtcatggatgtgctttctgtatttacaaacgcgctgctttcgctttttcatcttccggcaaatctggacatccctcttatcagcgggatgtttgaaattacacttgggagcaaactggtcagtgaagctgatgccgacttgctgccgaaagccatgattgtgagttttattctcgggttcagcggcctttccgtacaggcccaggtagccggcattttatcggaaacagatatccgctttaaaccgtttttcgcggcgcgtatccttcagggcatttatgccgcactctttattctcttactgtggaagccgctttaccttgcattggacgaaccttaccagtccgtattcctccctttccgcgatcaggaagcggtatctgctgtcgtcagcggatggaatacacttgttgaaaccggacccgccatcacgctgacagctctcgccgtatacgcattgatttattgttacaggctgtcagcacggacaaaaaaaggatgagacgccaatcagcgcttctcatcctttaaatttctgcttcagcgcctgttcaacttccggaggaacaaactctgaaacaggcccgttatattttgcgacttcttttacgatgcttgaacttaaaaaagagtactgattgttcgtcatcataaaaaaagtttctattgattcgtcgagcacgcggttgacggaagtcccctgcatctcatattcgaagtcagaaacggctctgagccccctgataatcgccttcgcccgcttttttttcgcatagtcgattaacagtccctgtgacgtctcgaccgtaacattcggtatgtcttttgtcacttctcttaacagctcacatcgttcctcaactgtaaacagcggctgcttagaagaattattgagcacgcatacgtacacctgctcaaacacgtttgccccccgtctgataatgtccagatgtccgtaggtaacgggatcaaaacttccgggacatacagctatacttgccacatcactaccccctatttcggtatatcgtcactcctgtaagcccgtaaatttcccttcttgttacggaaagcgcgccgacggcttcaggaagcgcaacggctttatcatgctcggctacgacaaaaccgtcttcattcagcatgttctgctcatcaatcatttcgataagcgctttcagcttttgctccttatacggaggatctaagaaaattccgtcaaaacctttttcccgtttcgccgcggcatagagagcccgctctgcatcattgcggtatacttccgctgaagacagcagatcaagcgctttgatattcgcttttaccgtttggatggctttgaaatcacgatccacaaagatacagcggtcaaatccgcgcgacagcgcttcaatcccgagaccgccgctccccgcaaataaatccagccccgttcctccgtcaaaatacgggccgatcatattaaaaatagactcttttactttatccgtcgtcggccttgttgatgtgcccggcacagcctttaaggctcgtccttttcttgaaccggaaattactctcattattcacaccactttttctgaaaactttgatgtttctcatcggctgagccgttatgtatcaaaacaatccttatcttatcataaagcattctttcaaacaatgaacgtgaaaccgtgtatacatattcacattcctgtcaagactaagtgtaacagcatcaatgaatgatgttgttgccaaccgcggagaagacttacgtttccccataagttcttcctccggtttctcctctcccttttccttctccttaacttgttaaggaatagaaggaccccgcaggtatctgcggggatttttttatatgccgattttataatcgtactctttcgctttatcaagctttgattcaaattccagctttaaaaaaggtttataagaaggctctaccttcttcacataagaataagaagaaatcttttccattgttttttcgattagatccatatcgcaatacagcacaacgtatttcagccgcttggaaacataatgaacgttgccgaattttctcagcattttgctgtgttttaaagaatgcagatatacgattatgccttggcgcttattttccatcatgatcacccgcctgactttctgttcattttatgtaaaagacgagacggccgtctcgtcaggaaactttgcatccgcagccgccgccggaaccgcacccgccgccgcaggatgacaggccgtcaaaataaggattccccgtcggaacttttacatgctccgagacggccgttccgagttcaatgctgatctcgtcaagcagcgactgaagctcagtctccgcttttttaaattcggccaccttatcgtttaaatccagttcccgcttcatttctctcattttgcgggaaatctctctataatcaggatggtatttgccaaagcgctgcacatcctcatactgctctttaacgctcataaaagaacgaatgatccgccctgcctcttcatcttcacggagacgcttgtaacaatcgcggtaattttcagccgtctcagactgcagaatcatgccggcaagctgctccgcttcactttgaagcttgacggactcaattgttgcatacataaatacgcacctccagttgctagtttaccatgaaaccacccaattggaaaatgcggcgtttaaacgctttttaatcctgtgaacgcatggcgtgaaccatctgcatcatcatctgcgccatttgaatcccgtttgagaattggcttacccgatgcggtatcgtcttttcataaaaattcatcatgtcaagctgaaaggaattgagatcgtccggttttctcgcaagtctgcggtaccagacgggacgctgccgtataaaccgtttccgttcctcatctgcggatatgaattcctgaacctcttttcgcatacacgatccccttctttaatcctttctgaacgaaaaaggatgttgtccggagccttgccggggctgcttcgtgttgctccccgaaaattggcttaaaaggctttgcaatgatgaaatggactggctcattttattgatctgctcattcatttggttgatatccatctttttgacggcagtgaccatttttgaaacgaaatcgtttttttcagctggttcctgtttggtttccgcgtcggaagaaggctgaacggcctcgtctttaaaaggatcccatatcggatcatcctcgcccagaagaacccaattttcatagacttcctgccagctcctttgttccttgcgaacattttggatcagtttgggatgcttttttacgaattgtttaaaatcatcgattgattgccgtgattgctgattcgccacaattctcaccccctccgaaaagttttgcctgctataatgtatcggttcattcgccttaatgttcgcctaaattgcgaaaaaaagcaggtatatttttttcagcaggagcgccgctcgcgaaaaaacataaaaaaaccgcgggggacgcgcccctctgcggttttttactgccaaggcttaatgaagttttgcgtataatacttccggtccacgccgacaccgaggtgcgtataatccgggcttaacagcgcctttctgtggccttcgctgttcagccagccctccacggctgcaggaccgtccacatagttgtaggcaatattttcaccggcctcccggtatttcacatcgcctttttccaagcggtccttcagagtcccgtatttctttgagacgtgagagaaatacttgttatccttcatgtccttgctgtggccgaatgccacttttgcggcgtcttcgtcccatttcagccttgcaagtccgtgtttcacgcggatgacatttgtaatatcgagaatctgctgttcactcgctcgttcaatgtcgttccattttttatcagaaacaggctcgggttctgtcagctttcctctgtacatgacctcatacggcctttgtttcacaagtatttccgcatcaaatgccctgatgcttgacagattcccgtcaaatttgtccatgtacagctgaacatacatcccgcctatcttgacggtgggacgggtattgatatcttcttcagaaaactcgaaccgatacgtgtttcccttgtcagtcacattgacaaaaggagaaacctgcgtcgttttaaaaacttcgcccgtcgattcgccgatcttaaacggttttgcgttgatgccgcttcctgaagcatataaagtcacggctttatcattcaaaataccgacttgtacgtattggtctttcccctggttgtacacccaccactcgtaatcgtaggcagaaggatctttccgggacggttccccaagtttctttttcacatcggcggcagatttccccatgagagaaagcagtccggatgacggcattttcagccgttttccgctctcttcttcattggaaacctgaggctcctcctgatccgtctttttctgaggagccgatccatattgtataaacagaacatacgctccgtaaataagcaaaaggataacgagagcccttgcgatatttttcaacctctcacccccatatgttcaaaccgttctgtttttgtttactcttatacagtacagcctatttgcatcgtccgtgatttatgtttaatggataaacccctccggaccgccgtcttcagaaatgtcagacagcgcccggcctgcttgctcatttgattgctcggccaacgaaagatcgccgagcgtaacaatgccgaccagttttttatcctttgtgacgggaattcttctgagctgatgttcagccatcaaatggagcacctcctccacagaggcgtcttcttctgcactgataacccgctctgtcattgcgtcggttattttttgagagttcggcttttttgaagcaattccccgtaatacgagatctctgtctgtcacgatcccgacaagggtcgcgccgtcttcatccactatcggaatggcgccgacatccgcgtctttcatcttcaccgcagcttcatatacattatctaatactgtacaatattgcaagtctgacgtcatgagcttattgatctttgtcattgcggaattcctcctttttctgctactattgtcgtcaaatttttctttttgcatactttcaccgtatgaatcattgaaagtgtaacgctttcatactatgattgtcaggaaagggcatttttaaaaggagggggaaggtttgaagtttgaaaacagcggtcttgaaggggtaacagcggagctcagccgcttgaatgatctgatggaaggtaaagggctcattctggctggacaatgggattatgaaagagtgacttacgacaaaaagttttcagtacctgaggggacattttatctgcggattcaaggaacggcaaaagagggcgatgtcggcggcagccgggccgtgattcagctgaaggcccctcttttaggaaagcattattatccgcacggcgtagaatacggcagcgctgaagaatttccggaacatgttgtcgctgaaagcaaagctttactgcttgaattggaagagtcattaaaaacagtgcaaatgtaataaaaaagtacagcatattctgctgtactttttttatgagacggtatgctcgatatacggcggctctgacagcgtatctttttcccgttccgttctgacccactgaaaaaagatgacagccaaatatgttccgtagaccgcctcttgaatgattttcatcagcactgccccaagctgctgatcttccagaggaggcagcgtgttaaacatctccggtccggataaagggatctcctccaacaagtctaaaggaacgcaaagcttcattgcttcggcccaagccgccggatctgtatacgtggcatacatgggcgccccgctgaacataatgagcgcgcaggccggcgttaacagaatcccgtctgccataatataccccagcttcattaaaccgctgagacggggcagaccgtccaccttatgcacaagcggccaccacataaaaaacgccgttacaaagatgagtccgttcatcagcgtgtgatacagcgaatccgttttgacgaaatcaaatataaacgggatgtgatacagtgaaaaaataccgttaaacagcactaatgcgataagcggcattgaaaagaacgaaaacagcggctttacgacaggacggaagatcagttttttccatgcccagccgggaattccggaaatcaacagcggcggtacgactaaaaacagaaccgccatctgcgtcatatgggcgctgaacatcacatggcccaataaatcaaccggacttcccgcagccgcgtaaaaaaacagcgcggaaagcacaaacagcaccttctccttagcggccacacgtcctttatgccggctgcaccagtaaaagtaaacacctgttatcacggcagttatacaaaacagatacgggctccacattgcgcgaaacccgaacatttctaaattaatcaaatctctcactccccgccgccccgattaccaccaaataatcgtgacaaatgcaagcacggtgataaacgcgacaaatattcccgaatacagaaataatgacggcgcttcatgccctttctggctcatatgcataaagtaaaacagctgaaagatgacctggatgaccgcaagcaggatcagaaacggcatcgtaaaccatccggcaatgccgtctgcagccaccgtcaaaaacgcgacaagcgtaagaccgatcatcaaaccgaaggatatgacctgatatttcatctcctcggcatttttctttttccgatattcgagatccgtactgacagtccctctgtttttgttatcgtccatcgttatcccaccatccccatcaaatatacaacggtaaagataaagacccacacgacatcgataaaatgccaatataagctggccacataatatttcggcgcattataaaggctgagccctcttttcgcattccggatcataagcgcgctgatccacaacagcccgaacgccacgtgtgctccgtgtgtgccgaccagcgtgtaaaacgcagagccgagcgcagagcttgtaatggtaaagccgaattcgtgagtgtaatgcataaattcatagatttctacccctaaaaatcctgctcccaataaaacggtaaccaaaagccacacctgcatttttttaaaggagaaatttttcatatgatacatcgcatacacactcgttaagctgctcgttaaaagaagcatcgtcgcgataaacacgatcggcagctcaaacatctcagccgttgacggccctccggctttagattcccgtaaagcaagaaatgtcgcaaatagcgaggcgaacagaaccgtttcgccgccgagaaacagccaaaatcccaaaaacttatttttcccctccagcgttgctttttcaggagaagccggaaaggtttcagccgtcattttttcctgcagctgcattacgccttcacccctttatcatcattcggcagatcttctttgtgaatatgatagccgtaatcatcgaccacagagcgaagcagcatggtaaagaatgtgatgccgagccctatgaagataaccggaagcccccatgaataatcggagtggtataaaaacccaaacgctgcgacaaacagcccgaaagatatgataaacggcatgatggagccgttcggcatatgaatgtcctctacaggctctgcaggcgccatcccttcatttccggcctgcttttcaatccacagcgggtcaagtccccggacaaacggaagctgtttaaaattatattccggcggcggcgaagagaccgcccattcaagcgtacgaccgtccagccacgggtcgttcccgacgtatttcccctttattgaggtataaataatattgaccacgagtaaagcagccgcgcccgccatgaaaaacgcgccgattgaactgatcaggttgccggtatcaagaccctggccgggcagatatgtgtaaacgcgccgcggcattcccatcaagccgaggaaatgctgaatgaagaaggtaagatgaaacccgataaaaaataagacgaacgaaatttttcccatcgtttcatgaagcaccttcccgaacattttcggccaccagaaatgcacgcccgccaggatgccgaacacaacgccgccgataatgacatagtggaaatgcgctacgacaaaatacgtatcatggaactgataatctgccgctgcggccgccagcatgacacccgtgactcctccgagtacgaaagaaggaataaaggcgacggcatacagcataggcgtcgtgaatttgacatttcctccccagatggtcaaaagccagttgaaaattttaatgcccgtaggcaccgcgatcgccatcgtcgcaaccgcaaatattgcattagcgatcggtccgagtcccgtcgtaaacatgtggtgaacccaaaccatgaacccgagaaagccgatcagcacgatcgcaaagaccatagacgaataaccgaacagacgtttcctcgcaaatacgggaatgatttctgaaaaaatcccaaaggcgggaagaattaaaatgtatacttccggatgcccgaaaatccaaaacagatgctcccagattatcgtattgccgcccaattcaggattaaagaaattcgttccgaacaaacgatccagcatcatcagcgccaaaccgacggtgagcggaggaaatgcgaataaaatgagtgccgacgccacaaatgtcgtccacgtaaacagcggcaatctcatatacgtcaaacccggcgccctcatattaataatcgtggcgagaaaattgatccccgcaatcagcgtacctaagcctgatatttgcaggccgagcacgaaaaagtctatgccgtgccctttcgaattcagcgcaagcgacgcgtacgacgtccatcctgcatcaggagcgccccctaaaaaccagctcagattcaaaaagatgcctccgaagaaaaacagccaaaatccgagcgcattcagaaatgggaacgatacgtcacgcgccccgatctgcagcggcacaaccgcgttcatcagcccgaataacagcggcatcgccgccaggaagatcattgtcgtgccgtgcatcgtcataatttcattaaactgctgcgcacccataaaatcgttccccggcctcaagagctgaatcctgataagcatggcctcaagtccgccgacgacgaagaaaaatcccccggcgatcatatataaaatcgcgattttcttatggtcaaccgtcgtcaaataatcccaaagcaaagagctttttctttgctgtcctgtaagcgtattcatcatttgcgacctcccccctgatatctccctgtcctcacttgttctccgctttcagcccttttaaatattcatacagcgcatccgtttcagcgtccgagagcttcggataagtgcctgtcattttattgcccggtttaatgctgtccggatttttcagccaggcttttatattctctttattcgcatccttaatgccggccactttgacccgttcaccgaaggtagcgaggttcggagccgttcttgccgcttcagcccgtttatcattgggctcaaccgcatgacagctcaggcagtttttttccttaaacagctcttctccttgcgcggctaaaccggaatctgttgtatgcttataatttttcatcgctttcgtccattgtttaaattcttttgacggcagcggcttcactttgaaatccatcagcgcatgtgaaggtccgcacagctctgcgcatttcccgaagaaatattctcccgcttctttgctgcgtttagaatcgaaggtcagaaagaaagtattgtcattatccgtattcgtatcgatttttcccccggctgacggaatccagaaagagtgtttcacatctgaggacttcagcttgaaatagacgcgttcatctgtgggaacgatcagctcctgacttgtcacaaacccgtaatcaggatactcgaattcccaccagtataaattcgcccttacattaataacgagcgcatcctctgctttacggtttttcttatccatcggcgacgtatccgccagcgccaatgtgtcgatgacaaccggaatgacaagaataatcagaagcaggatcggaataacggtccaagtgatttctaaaaaacggttcccctccacctgtttcggtatcgtgtcttcccctatacgcgaccgtctgaatctcacaatgacgtaaaagaaaataactgctacgaccgcaacgacgacaaccatgataagtgtgctgagcaccgtcagatcatattgtttatcagccacttcgccggcaggcttgagtgtggacagaaacggttttccacagccgctcaataaaagcggcactaaggctaataatgataaaagacgccaacgctttaacatttcacccaaccccttttttgaatcagtacgagatgcacaagcagtaaatctgcttccagccgaaatacttcttttcctcatttcttaaaatatgagattttttacttaaaattccatctatgtataaaagcaaagccgcctgattaaacaaaaggtcaaggcggcgtttactagttgtcattgtttgttttggcgatcaaacaagctcattattcaattaaaacagcgtaaagaccaccatcgctacaaaataaatggtcatgtaattaagcgaataaacaaacataagagttgcccacttcatgatgtttttcatacggaatcccatcagtccgagaataagccatccgacattcagcaaagtgccgagaatgacgatcggaagaccgagactgccgaggaaaaacggaagcggcagcaggcatgcgacccagacgataatctgtcttttcgtcacttcaaagccgtgcactaccggaagcatcggaatattcgctgctctgtaatcttccgtcttcttaatcgcaagcgctaaaaagtgcggaatctgccagatgaataaaatcatgaataaaacccacgcgacaacaccgatgtgcccttcaaccgctgtccagccgattaacggcggcacggcgcctgatacacttccgacaaccgtattaatcgtataacggcgtttcgtccacattgtataaagaacaacgtacgtaaacacgccgataaaaccgatgactgctgccatcacggtggtcatcaaaagcatgataagtcctaaagcaatgagtaaaattcctgaccacagcgcttgattcggctgaatctttccggttaccgtcggccttactttcgtgcgttccattaaatgatcaatatcacggtcgtaatagttgttaaccgcacaagaaccggcgatgatcaaagaagatcctattaatgtaagaagcacggtgtttaaattgcctaaaaaactcagaccggatatatgtaacgcaagccacatgccggtaaaagtcgtaattaaattcgaattgacgattcctattttgataagcgaaaggaaatccttccatgccgtcgtctcttcaatctgtccgtctatagctgtatcgtttaaaattctggaattagccataacgtaaacctcccttacaaacctaaagcaggttttttaagacctgcaactctatcatacaagataatgacctgtaaaaaaacatcctcttaaatattaaacgagaaacaggaatttatttgtgaactttttatgaattttaccaaatccgccggtttcataataaagcggttactttatttctatcagacccatctggaataatcaaccccattatctaagaagtcctgattctattatatttttgtgaacaaacagaattgagaattgccacaaaacacatattcgcttacacttggtacgtatatcattttgtccagtttgttaagaaggtgaatgtaaaatgaataaagctttgaaagcgctcggcgtgctgacgacattcgttatgctcgtcgtgctgatcggcggcgctcttgtcacaaaaacaggatcgggtctcggatgcggaaggcagtggccgctttgccacggccggtttttcccggagcttaacgccgcttctatcattgaatggagccacagactcgcaagcggtgtctcaatcgttctcgtgctgagtctcgctttttgggcatggagaaaagtcacgcctgttttccgtgaaacaacctttctcgccattatgtccattatctttttatttttacaggcgcttctcggcgcattagcggttgttttcggatcaaatgcgctcgttatggcgcttcatttcggcatatcgctgatttctttcgcttctgttttgattttgacgctgctcatattcgaagctgataaatcagacaaaaagctcgtcaagccgctcagaatcggcaggaaaatgcagtttcatatgatcggcctttcgatttacacgtatatcgtcgtttatacgggggcttatgtgcgccatacgaaatcaagccttgcctgccctgacgttccgctttgcagcaggctgaatcacgggcttccgtcccattttcaggaatgggtgcagatgggccacagaacggcagcgctgcttctgttcgtatggattcttgtcgcttttgcacatgcggtgcgctcctacaaagaccaaaaacagattcttgggggctggatagcggctcttgcctttgttgtattacaggcgctctccggaatcatggttgtttattcagaaatggccaccggctttgcacttgcccattcgctctttattgccggcctgttcggcgtcttatgctatttcttattattaatcgcccgcttccgctatgaatcaaaacagcggtacatctgaggcacatgaaaaggccgaagcattagagcttcggtctttttacatctaaaaaacctgatcgcacacgagggcggatcaggtttttttatgttcattttttacgctttttcaatttcgatcagtaaatcgcctgtctgaatcggttcaccgtttttcacatgaatctgctgtatcgtcccggagaacggcgcctgtaccgtcgtctccattttcatcgcttcattaatcatcagatgatcgcctttattcacctttgccccggtttccgttaacaatttaatgacggttcccggcatggatgccgcaatgtggcttgggtttgtccgatctgcttttaatttttcctgtacggacgatttaatgctttcatctttaatgaccacctcgcgcggctggccgttcaattcgaaataaacgacacgtgtcgcatctggctgcggttcaccgatagatacaagcttcacgatcaacgtttttccgcgctcgatttccacttcgatttcttcaccgagtgtcatgccgtagaagaaagtcggtgtgtctaatacggaaatatcaccgaagcgttctgctgttttaacatattcagtaaacaccttcggataaagagcatacgcgattgcgtcctgatcactcaattccatctgatgcgtttctttccattcttctttaatggcttcaaaagataccggttcaagcagctcacccggtcttaccgtgatcggcgtctgtcctttcagaacgagcttttgcagtttttccggaaatccgccgtgcggctggccgatctgccctttaaagagctcaacgactgaatccggaaaatcaagcgtttcgcctttatcataaacatcttgttctgttaaattgttttgcaccatgtaaagcgccatatctccgacgactttggaagaaggtgttactttcacgacgtcgccgaacatgcggttgacgacgctgtacatgtctttcacctcattccagcgatcgcccaggccgactccttttgcctgctgctggagattgctgtactggccgcccggcatttcatgattataaatctcagtatgcggagacttcatcccgctttcaaattcactgtaatactgacggacggattcccaatattgtgacagtctttccacctggcggacatccatttcaggacggcggctgtttccttcaagcgcatgataaaatccgcttgcgctcggctgtgaagtcagacccgccattgagctgacggcgacatccacgatgtccacacccgcttcaacagctttggcatagagaaagacgccattgccgctcgtatcatgcgtatgaagatgaacgggaatatcaatcgtttccttcagcgctgagacaagttcatatgcggcttgaggtttcaaaagaccggccatgtctttaatgccgagaatgtgcgccccagacgcctcaagctctttcgccatagaaagataatattgcaaatcatatttcgtccgggtcttatcaagaatatctcccgtgtaacaaatcgcagcctccgccacttttccggtttcacggacggcatcgatggccagcgtcatcccttttacccagttcaggctgtcaaagatccggaatacgtcaataccggactccgctgactgccggacaaatttttggatgacattgtccggatagtttgtataaccgacggcatttgatgaacgaaggagcatctggaacaatgtgttcggcacttccttacgaagatcttcaaggcgtttccaagggtcttcttttaagaaacggtacgctacatcaaatgtcgcgcctccccacatttcaaggctgaacagttcaggccacagggcagccgtaggattcgcgatttttttcaaatcattggatctgatccgggttgcaagcagggactgatgggcatccctgaacgttgtatcggtcaggagcacggatttttgctctttcacccagtcagcaagcccctcggcgcctctttcatcaaggatctgtttcgtaccgcttgccggcttttccccgatacctaacgtaacggtctgaggcttatcaaatgcaggtttttcttttttcccgattcccggaaaaccgttcaccgtgacattgccgatataggaaagcatttttgttccgcggtccttctgttttgggaaaacaaacagctcaggcgttgtgtcgataaacgatgtgtcgtattggcccgtcaggaatttttcatgctttgccacgttttcaagaaacggaatattggtcttaatgcccctgatcctgaattcctgcaggttgcggaccattttcgctgatgcctgttcaaacgtcagcgcccatgtcgacagcttgacgagcagtgaatcataataaggcgtgatgacggcgccctggaagctgtttcccgtatcaaggcggacgccgaagccgccgcctgagcggtaagccataattttacccgtgtcaggcataaagtcattcagcggatcttcagtggtcacacgtgattgtatcgcatacccgtttgtaaaaatgtctttctgctcagggatattgacggcacggctgtgcagtccgtggccctgcgcgacgaggatttgcgtctgaacgatatcaacccccgttatcatttccgtaatcgtatgctccacttgcacgcgcgggttcacttcaataaagtaaaattcaccgcccgctacgagaaattccacggtccccgcgttgatatagccgacatttttcgcaagcgccacagccgcttgacagatttcgtcccttaattcaggctgcaaagatacactcggcgccacctcaatgactttttgatggcgtctctgaacggaacagtcccgctcatacagatggacgacattgccttctttatctccgatcacctgaacttcaatatgcttaggattttcgatcagtttttcaacatacacttcatcgtttccgaatgcggctttcgcttctgatttggcccgctcaaacgattctttcaattcgctttcgtttcggacgattctcattccgcgccctccgcctccgagcgatgctttaataataaacggaaatccgtggacttttgcgaattgttcgacatcttttaatgtttcagccggtccgtcactccccggaataacagggatgccggctttttctgcctgctccctcgcctttaccttatctccgaacatatccaaatgcgctgacgtcggtccgataaatacgatgccctcttcttcacagcgtctcgcaaattggatattttcagagagaaatccgtagcccggatgaatggcatctacgccgtttctttttgcgatctcaataatcccttcaatatcaagatacgcgtcaatcggttttttgccttctcccactagataagcttcatccgctttatagcgatgataggagcccgaatcttcttttgaataaacggctaccgttctgatgttcaattctgtgcacgcccggaaaatccggatcgcaatttctcccctgtttgctactaacactttttggatggattgttgtgacaaacttttctcccccttggcctaataaatatgtagtttataataaaggaatatccgtcctgtgtatacacttgttttttagagatacacagatttttccgtctgccgtctttttacccccttagacggaacgggctccctctttttcttcttttctgagtacttgacatgcatgctgacattcaccaatataccggcgctcgttaataacaaaaacattgatgatcccccgtagctgataaacggcagcggaacacctgtgatcggaattaaaccgctgacaccgccgagattgataaaggtctgaatcgcaatcatgctggatatcccgattgccaaaaggctcccgaacggatcttcacattttctcgcaatataaaaaccttttaacacgacaaaagccagcagcacaatgacaaacaggacgccgaaaatgccgagctcctctgaaataaccgccataataaagtctgtatgcgattctggcagataaccgtatttttgaatgctttctccaagaccgagaccgaaaaaaccgcctgagccgatcgcataatacgaatttataatctgcaggcctgatgtgctggcgtatttaaagggattttcaaggctttcaaaccggctcatacgcccgggtgtcaaaatatcgtcccatttcagatagatgatcgggctgacaaggagcaatacgattcccgccatgagaaccagcctgagcagggtccttccgctgaatcccgaacacataatgacgcaaaacgcgatcaggccgataatcatcgccgttccgaagtcaggctgaatggcgataagcgcacaaatgactacggtgacgatcaccggcggcgcaacccccgtcaaaagctgatcgatatagctttgtttctttgcgtataccgcggcaaggtacagtatcagggacagcttgacaaattcccccggctgaatggccattccgccgattttaaaccagctttgcgcgtttccggcaacatgtccgaaaacaaacagcgcgcaaagcgcagccactgacgcaagcagtatgaatttctgaatcttttgatgggcgaacactttgtacggaaaaacggccgcgatgataaacagcacaaaccccgcgatgacggcgaacagctgccgtttaaagaaatagtcgctgctcacgccgtaacgcataacggcggtaatcatgcttgagctgtataccattaccaatccgaaactgcacagcagaatgatagcgcatatcaatgaataatcgtaagattttaacattcttttaaacataacatcctctttcctgcttaaagcttacgtttaatacctattgcgtattatattttactataattcataaacattttacgcagtttctttatagtttttcggatgaaatgcagattaagagaccgtcttacgaaaagaagatgcaaaaaaacggtttacggttataaaaaaacccaaaccgttgaatagtttgagtttgatcatttattttcctgtaaacgcatcatgcaaagcagacagttctctttcaagtctgtccagcagctctttgccgtcgttttcgtcaactaatcccaggcggacagcaaaatcgatttccctcgacagtccgaacatctgagtatccaagacctcttcataaagaggacattgaggcatcgttaagttatccatttgtactcggatcagcttcaaaatcttctcagcatctaacttcaacagctcgaatgctttctgctgatggtcaactataatctctgaagccaaaagtatccctccgttccccaggcgagtacctaattcttctatttatcataaagggtatcagatgaaattgcaagaggatttaagcagatgttatgataaaaaatgtttcaaaaaatactcagcctgtatttctcagacatgatttccaaaagcttcacacccgcgatgctgttgcctttttcatcaagcgccgggccgaatataccgattccgaagttgtacggcgaaatgcccatgatccctcccgaaacgccgcttttagcgggaatgccgaccttaatcgcgaattccccgctcgcattgtacatgccgcatgtcaccataaacgtcttgcagattctcgccacatcttttttaatgacctgctccccggtttccggatgcttgccgtcaagggcgaatacgcagccgattttggctaaatccagactgctcatcttaattgcgcactgttttgtatacaaatccatgacctcttcaacatcgcctttaaaaatgtcatactgcttcatgtaataacacatggcccgattaatcatggatgaactgaattccgattccgcgacatgtctgcaatatgtaatgtcctgattattcgcaagtcttctgatgaatccgagcaggtaatccaggcggtctttcggcgaatgccctttaatgaaacccgtaacgacgagagcgcccgcattaatcatcggatttaaaggcttgcccggattcactgtttcaagcttaatcatggaattaaacgggtcgccggtcggctcctgacccacgcagctgaacaccttttcctttccgtaatccatcagtacgagcgccagagaaagcactttcgaaatgctctgcagcgtaaatgtccggtcggcgtctcctgccgtcagacatgtattttccgcatgataaattgtgaccgaaaggctgtcttgttcagattcagccagagccggaatatagtctgccactttgccttcttcggtcctttttttcgcttcttgaactaatgcgtccagctcttggtaatgccggcataccatgtcgatcatcctcacttcgctgccgttgtatacatctaatttgcgacgcaaagtgacaattcatgcgaaaacttttatactttaagtaaaggggggcttcaccatgagcgttattcaagtaaaaggcaatgttacatacccgattacaattgatccgagtgtctggattttcgatgaccgcaagtttccgtttgaaaaaaatcagcccgttcatccggacggctctgcagaaacccaggagcatacgcttgatccggaacgggtgatcagagaagggcgcatttcgccgccgactttaaaaagcgaaaaacgttatgaaaaagaaagactgatgaacggcagcttcgccatgaagctcggcgctgttttagcaaatgccgagccgaaagaaagcgctgtcctgtgcgcatttatttcaaaatcagaaagaaccgaagtgccgctcgaaaaggcgatggacgcaatcgcgcatttcagcgatggggggaaaccccttcaagacggcggcccggtccatttttacgtggacggagacttagaaaaaccgataacgggcgtcacagaaatcgaagttttataacaaatcggctgcaagctgtgcaaggccggatctctcacctttcacaagcttcacgctgccggagacggtttgttctttaaaccgttctacaacataagcaagtccgttgtttaaactgtctaagtatgggtgatctatttgctccggatcgcccatcaggacaattttgctgccctctcccacccgagtcaaaagcgttttgacctcgtgcctcgtcaaattctgagcctcatcaataataataaactgatccggaatgcttcttccccgaatgtatgtcagcgcctccacctgaatcgatccgattcctgccaaaatcgcttcaagttcacccggctttttcgcattgaataaaaattcaagattatcaaagatcggctgcatccacggcttgagcttttcctctttttcgcccggcaaatatccgatatcctttcccaccgggacgatgggacgcgcgacgatcagctttttataaataccgagatcctccgtctgcagaagccctgccgcgagagcaagcaaggtttttcccgttcccgcttttccgatcagggtgacaagcgggatatcttccctcagcaggagttcaagcgccattgtctgctgaacgttcttcggcctgataccccatacgtgctcatcatcgaaaacgagtctttttacggtctcgcctttcttatctgtcatgccaaccgcagacgaagatcctcctaattcatctttcatcagcacaaattgattcggataaacctgatgctgctgaagctccttgactgaaatttgtttgtctttataaaacgaggcaaaccgctctttattcataaatatatctttgtacccgctatatatttcatcatgatcaacgactctgtcgtttaaaaagtcctccgccaaaagcccgatggcatccgcctttaccctgacaagcacatctttgctgaccaggatgacgaggcggccgttttctttcgtttcctcctcaaggcttaaatttttcgccaccgccaaaatgcggttatcattcgttttttcgataaaaatttcttggagctggtgaaatgaccggtggttcagttcaattctgagcgttcctccgctttcaagcggaactttctcgtgcagccttcctttctccctgagcccgtctatcagcttagatacgtgcctcgcatttctcccgacctcgtccatataccgcttttttgaatcgacctcttccagcacgacggcggggatgacaacttcgttttcttcaaaggaaaaaatggcgttaggatcctgcaaaagtacattcgtatctaacacataaattttactcaagtctcagcctcctgaaataaggatcaaagcccatcgtgtgcttctctttccgcgaaaaacggggatgcctgctaaaatatatgatttggtgaataaagatagaaggttaattcaacaataaaataaatgaaagcattcaaggaggaaatctgacgtgcgaattcttttcattatcatacaagccttgtttatccttaccggctgcactgctgtacaggacggccgcggccgcaatattcagaacgaatcagccgatcagcgcgatgcaaaaccgatccatgtgaaaaatacggctcctgagacagctgaaaatcccggccggacagacatcgctaagcatctcgtcgaggtaaccgaaaaaatccccggcatttcagatgccaccgcggttgtactcggaagatactccgttgtcggtatcgatgtggatgacaatttagaaagaagcaaagtggagagcattaaatacacggttgcccaggcgttaaaaaacgatccttacggcgccaatgccgttgtcgtggctgatcctgatacggtttcccgtctgagaggcatgggcagcgacattaaggccggccgccccgtttcaggcattttggacgaacttgccgccatcgtcggccgtgtcatgccggaagtccctaatgatgtgaccgacaatgaaaaagaatcaccgactcaatcgaatgatgatcagctgaacgaaagagaccagaataagctgcagaacgaacagaacgatcaatcggatcatcatatgaaaaaccgccggtaaaaagcagcgcccgctccaaaggaagggcgctgctttctttccctttggcaggaggggcatccatgatataatgcttgtcatagtgaaagaggtgaaaaatcaatgagagtaaaatgttccatttgcgacaaaatcgaacaaattgatgatgaaacactgacagccaaacgcctccgcaatcgtccgattcatacatatatgtgccgggaatgccatgaccgaatcaaagtcaaaacggaggcgcggctgaataccggacacttttcctttcatcccggacaaaaagcgaaaaaagataaactgaaaaaataaaccgaataaaaaatgacccgccggaaggcaaggtcatttttttattgtggtttagctgactggctttttttggactggtgcagacggattttgtaaatgatcaaaatcaaggcggcaacaacaagcccttctccgaccggcagaaacacaccgaaaaaagtcagcacggtgcagccgagcacgagaaagagataaactgccgcagccttcaaaaccggcagccgtttggcaaagccgagtttaaatacaatcaccgaaagcacgacgatcgttccgtataacagccacattcccgtcagcggatgctcatccacttggtaaagagccgcaaagaacgacagccgttcacttacttcattcaaaaggatccccctccccttttccgttcgggttctaccttttcaaattctgcaagtgattaagacattcctgctgtttttttctttttcgccgctttttcacgttcgtttttattcaggattttctttcttaaacggatggattccggcgttacttcacagtattcatcttcgtttaagtactcgagtgattcttcaagcgacataatgcgcgctttcttaatcgtagtcgtttgatccttcgtagcggaacggacgtttgtctgctgtttcattttgcttacattgacgacaaggtcattgtcacggttatgttcgccgacaatcatgccttcatatacttctgttccgggctcaacgaagatgacgccgcggtcttcaataccttgaattccgtaagatgtcgcttttccgttttccatggaaacgagcacaccctgacgccggcctccgacttggcctttttgcatcggctgatagctgtcaaacgtgtggttcaggatcccgaaaccgcgtgtcagtgacagaaactcagtagaatagccgatgagtccgcgtgaaggtacggtaaagatcaggcggacctggccgtttccgttattaatcatatcaagcatttcgccttttctcgcacccattgattccataacagaaccggtatgctcttcaggcacatcaatctgcacgcgctcaacaggctcgcagcttacgccgtcgatttccttaatgataacttcaggtttagacacttgaagctcatagccttcacggcgcatgttttcaattaaaatggacaggtgaagctcaccgcgtcctgaaacaacccatgcgtcaggtgatgcagtcggttcgacacgaagactgacgtctgtttgaagctgcgcgttcagacgctcttcaattttgcgggctgtgacatatttgccttcacggcctgcaaacgggctgttgtttacgacaaatgtcatttggagcgtaggctcatcaatgcgcagaaccggcagcggctcatggtggtcagccggacaaaccgtttcaccgacgttgatgtcttccatgcccgaaacggcaacgaggtctcccgctctcgcttcttcaatttccacgcgtttcaatccttggaaaccgaagattttcgttacgcggaatgattttaccgttccgtcaagtttcatcaatgaaacctgctgacccactttcatcgtgccgcggaaaacgcgtccgataccgatacggccgacataatcattgtaatcaagcagcgccacttggaattgaagaggctcttcggcgttatctaccggggcagggacatgttcaagaatcgtttcatacagtgattccatattttcgtcctgctttttcggatccagacttgccgttccgttaatcgcagaagcgtagacgacagggaactcaagctgttgttcgtttgcgtcaagctcgatgaacaaatcaagcacttcatcaatgacttcttccgggcgggcgaaatcacggtcgattttgtttacgacgacaaccggatttaagttctgctcaagggcttttttcagtacgaaacgggtttgcggcatgcagccttcatatgcgtcaacgactaacagaacgccgtcaaccattttcataatccgttctacctctccgccgaagtcggcgtgtcccggagtgtccaaaatattaatgcgtgtatctttatagttaatcgcagtatttttcgcaagaattgtaataccgcgttcacgttcaagatcgtttgaatccattgcgcgttcggcaatattttcgttggcacggaatgttccggcttggtgaagcaattggtctaccaaagtcgttttcccatggtcaacgtgggcaataatcgcgatgttgcgaagatcgtttcgaagtttcacattttcatctcctaaaaaaattagataactttcatattataccacacatcctctttaaaagcgttacgtttttctgtaaactgaaagtatgacgttaaaggggatggaaatatgaaaaaattgaattggctcttattattatttgcattcgcagcagtcttcagcatgatgctgatcggcgtatcaatcgctgagaaaagcgcatggggcatcatcggaagcattgttctcgttatcgccatgatgggaagcggtttcaccgtaaagaaaaaaatgcgcgaacagggactgcttgattaaaagcatgaccctttgcaaaattccgtaaacatggaaagacaatatcttatgaagtctgaatcaaagattcaggcttttttatatcctcaaaacaggctccagatgtaaggcttatctcccccgccgcctagtcaggaagccggaaatgacagctcccactctagttacatcagcagattccctcagaaaatgaagtcagaaatagtccggcaccgttatgcagaaaataccatacctcctatatcaattccatcattgtctttttatacttgtggctgtaagcaaatacacatgacaaggagagaatgaaatgaaaacatcttttttgaagaaaaccgctgtaactgctgctgcaaccgcctcagccgccttgcttgcattcagtccgcttgattctgccggcgcaaaaacgatccaggtaaatgaaccgcatgccctggaggcttccgcagagaaaacaccggaagacgcggcaaaactcattgacatcatcagccaatcgatttacgaaaaagacggtgtctattattttgacggcgaaaaagcggttgaattgggattagatcaagaacaagcccagatcattcaaaagctgtgggacagttcaaccgaatttttaaccgttatttctcaatgtattgagaaaacggacggcgaatatacatttaataaagaaaaagcggtggagctcggctttacggaaaaagaggcccttatcgttgatcagctgttcaccgctttttcccaaagtcttcatatccttcaatctgcgctgattgaagaagacggtgtgtatacgtttgatcaggaccttgctgaaaaagcaggagcaggaaaaaaagaagcaaagctatgtgccggattctttaattcactgccccaggaattgcttgaaggcatttatacagcctttcatccggctgagtaaacggattaaaacgcccggtcattcagccgggcgtttttttaaatcagcagtttaaggaccagcatgataaagaaaacagcgccgaacaaacaggctgcttttatcagcagctttccgtaataccgttccttaaaccgcctttcttcttctgcataacaggatggcgccttcatctcagggctgccgaggtcaagcggctccttcatcatatgatataaactcccgcacttaccgcatgattcaagatggcgggaaataaaccgctccgtttctgtttcacaatcgccttcaatatataaagggagtaaatctctcactaaacagcaagtcatatctgtccgtccttccttttttcccccaagtgctgtttcagctgcattctcgccctgtacagggtgctcttcacctttgaaagactccagtccaaaacatcagcaatctcttcgtaagacagctcttgaaatacctgtcgaaatgctgaataaaatgactgaaaatctctgacatctgaaacaatccttttcgtttattaaggcctcacccatttagacaaacggctataaaaaaagttttacagatcggaacatttttcccctatcatttttcccgacttcatttgtcatttttttcagaataaatcgcatcattcgactcatgtctgattcaacacgtgcctctcggcttatcccccgatgccggccgccggaagcctttccgggacgattctatcaattcatcagcggagtctagttttatattgcagaatgagagaatgctggtttattataacaatataagttttcattattttcaaaaagggggatttattgtgggtttaggtaagaaattgtctgttgctgtcgccgcttcctttatgagtttaactatcagtcttccgggtgttcaggccgctgagaatcctcagcttaaagaaaacctgacgaactttgtgccgaagcattctttggtgcagtctgagttgccttcagtcagtgacaaagcaatcaagcaatacttgaaacaaaacggcaaagtcttcaaaggcaacccttctgagagactgaagctgattgaccacacgaccgatgatctcggctacaagcacttccgttatgtgcctgtcgttaacggtgtgcctgtgaaagactcgcaagtcattattcacgtcgataaatccaacaatgtctatgcgattaacggtgaattaaacaacgatgcttctgccaaaacggcaaacagcaaaaaattatctgcaaatcaggcgctggatcatgcttttaaagcaatcggcaaatcacctgaagccgtctctaacggcaacgttgcaaacaaaaacaaagccgagctgaaagcagcggccacaaaagacggtaaataccgcctcgcctatgatgtaaccatccgctacatcgaaccggaaccagctaactgggaagtaaccgttgatgcggagacagggaaagtcctgaaaaagcaaaacaaagtggagcatgccgctgcaaccggaacaggtacgactcttaaaggaaaaacggtctcattaaatatttcttctgaaagcggcaaatatgtaatgcgtgatctttctaaacctactggaacgcaaattattacgtacgatctgcaaaatcgacagtataacctgccgggcacgctcgtatcaagcactaccaaccagttcacaacttcttctcagcgcgctgccgttgatgcgcattacaatctcggcaaagtgtacgattatttctatcagacgtttaaacgcaacagttacgacaataaaggcggcaaaatcgtatcttccgttcattacggcagcaaatacaataacgcggcctggatcggcgaccaaatgatttacggtgacggtgacggctcattcttctcgcctctttccggttcaatggacgtaacggcccatgaaatgacacacggtgttacacaggaaacagccaacctgaactatgaaaatcagccgggcgctttaaatgaatccttctctgatgtattcggatacttcaacgatactgaggactgggatatcggtgaagatattacggtcagccagccggctctccgcagtttatccactccgacaaaatacggacagcccgatcattacaaaaattatcaaaaccttccgaacactgatgccggcgactacggcggcgtgcatacaaacagcggaattccgaacaaagccgcttacaacacgattacaaaaatcggcgtgaaaaaagcggagcagatttactatcgcgcactgacggtatatctcactccgtcatcaaactttaaagatgcaaaagcagctttgattcaatcagcgcgggacctttacggctctcaagacgctgcaagcgtagaagcggcctggaatgcggtcggcttgtaaacaaaaaaagagaccggagaaatccggtctcttttttatatctgaaacatttcacaatggcttcaccatgatcatatatgtcttttcccgatcgtctttttcaagcttaagctgttcaaagccgcattggcttaaaaacaaaacccattcctgcctgtccaggggaacggctgaaaacatcgctttatgctcccctctcagccggcccgcaatctcttcaatgaccgcgcgtccgattcctttctcttttgcctccggagcgacggccacggttccgagccacggttttccgtttgaaggcgcccattccaaatgaaaactgacggcggcaggagcgccgtcaatctcccatacgagccacgttccattgtacatggagtatgcaagcataaactccgccgcattttttgttccgaactcttcgtttttccacaccgggtgtgcagccgccagctgctccagaaacccgagatcttcttcttcaaaatctctacctgtcagcatgtaaatagtcgtcaaagataattttatgtattgccggattgcccgcaagcacgctgtggttgtctaaaaacgtaaacggttcgccatctgtggtcgtgtaaatgcccccgacttcgttcagcagcacgcagccggcagcgtaatcccacggcgcgagcctcatcgtaatgtatgcgtcaatgcggccggccgcaacactggcgagctcaagtgccgccgagccgtaggaccgcgttcctctgacccgttttacgagcggcgccaaaatactcgggtcaatccttctgttttccgtcacccatgtggcattgattgcaataatggcttcttcaatggaagcttcttttaaaggagcaagcggcgtgtcgttcagataagccccttttccgctgaatgcgtgatacagttcgtcctgcatcacatcataaattaagccgattttgccttttccgtcttcaaagatgccgatggagatcgcgaaatgccgcttttgatggacaaaattcatcgtcccgtcaatcggatcaatgatccagacgattccgtcaagggagcggagcttatctccctgcccttcttctccgagaatccggtgtccgggaaaagttccctgtatacggtcaatgaaaaagcgttccgtctctttatcaatatttgtgactaaatcattcggatttgattttgtttcaatcgtcaagctttcctgcatggattgtctgattctcgttccggcttcttttacccattgttttgcgatatcatcaatttccgtccaatttgtcataccgtgtacctcttttctatgtatagcttattctatagcatactgataaaggcgatgaaaaagcaaggaaaatgaaaaaaatgccttctcacgtaaaaacgaaccatttcctgcggttcgtttttactattctttatccgttaagccgaatccactcttttctgagacgttccagttttcttttgctgagatcgatttgatcttcattctctttttgcatggcctcatacagggttgccaattcataatcaacctctagtctccagacagctacacggttatttttttcctccctgaatccttccttcaccacttgcctcattgtctttcgccccttccagagatcatttgttaaaaaagcatcccatttttccaatttattaatgatacttcttatatcgtatggaaacttatattcggctgtaacaacattcttaaaattgtgtgtttacctattcgttttttaccccaatcctctcggctcaaacgttctcaatgtttttgcggccggcggcggctgtggtaaaatatgaatacttacgataaggaggaaaaagatgactcagatgcgttttacaaaagaagacttcgatacatttacaatagaaggtttagatccgcgcatggaggtgttaaaagaacaagtccgtccgaagctgaccttgttaggagagcatttcgcaccgacattgtcagcattgacaggcgatgaaatgttcccgcatgtcgccaagcacgcgagaagatctgtcaacccgccggctgacagctgggttgcctttgccaacagcaaacgcgggtataagaaactccctcactttcagatcggtttatgggacacccatatgtttgtatggtttgccatcatttatgaatctccgataaaagaggaatacggcagattgctggaagcgaagcaggaggacatcacaaaacagattcccggtcattttgtatggtcgccggatcatacgaagccaggtgcgtacaagcagtccgagatgggtcaggagcagctgaaaacattatttgaacgcctgcagacagtgaaaaaagcagagcttttgtgcggcattcagctgcaaaaagaagacgtgatcaacatgaacaacaatgaattcctgcaaaccattgaagacgcttttaggaagctttcctttttatacacactgactcagaaagtctcataacataaaaagcgggccgattgccggctcgctttgtctacattttgataatcgcttgatctgattgtttcgcctgtttcacagtcctatacggggaataggtgctgtcagcttcaaattggctgcagattttcttttcttccgctttcccgggaacgatttctttaaagcggcggtacgcattcagaagtctgtctcggtcagctcctttttcataggcgttttccacctgctgaaaaaaagcaatgacatccacggcctcctctgtcgtccagtcctcattcatcggatattgatattccaaatgtcttcactcctttataatcatgctcaaaataagcatcttccatagatcataaattgttctttactttctttcaagttcataatataattcatttgttttacgtttaaaaaacgggtaataaaactgaatgtaatacaaactaatccgtaggtattatgataaaggtgggaaaacaattgccgcaacatgaaacacccctgtacagcggactgaaaaagcacgcggacagacagcctgtccaattccacattccgggccataaaaaaggcgcgggaatggacccggaattcagacaatttatcggagaaaacgcgttaagcatagatttaattaatatcgaacctctggatgatttacatgcgccaaagggcattattaaagaagcccaggatctggccgctcgagcattcggcgcagaccataccttcttttccgtacaagggacgagcggcgccattatgacgatggtcatggccgtatgcggacccggagataaaatcatcatcccgagaaacgttcataaatccattatgtcggccattgtattttccggagcggtgccgatttttatacacccggaaattgacgatgagctcggaatttctcacggcattacgcttgagtccgccgagcgggctttgacggagcaccctgacgcaaaaggcctgcttgtcataaatccgacgtacttcggtgtggcagcggacttgagcagcattgtaaagctcgcgcattctttcgatgtgcctgtgcttgtcgatgaagcgcacggcgtgcatattcattttcatgataagcttcctctgtccgccatgcaggcgggcgctgatatggcagccacaagcgtgcacaaattgggaggctccctgacgcagagctccattttaaatgtgagagaaggccttgtttccaaagaaagagtacagtcgattttaagcatgctgacgacaacgtcaacatcctatctgcttctcgcttcactggatgtcgcaagaaaacgcctcgctacagaaggccgcgatcttcttgaagatacgattctgctggcggatcagacacgggaacgcctcaatcaaattgaaggcatccgctgtgtcggcgaagaaatcacagggtctaaagctgccttcagttatgatccgactaaattaatcatttcggtcaaaaacctcggcctgacgggtcatgacgttgaaaaatggctccgcgaatcatataatatcgaagtcgagctgtccgatttgtataatattttatgtattttcacccccggagacagagcaggagatgccgaccgtcttgtaagcgcgcttacagacatttcaaagcaggcttccgccaatgactatgctcatcagcaaaccgaagttctgcttcctgaaattcctctgttagcgatgacgccaagagacgcgttttacgcaaatacggaagtcattccgttaaaagaatccgcgggacggatcatcgcagagtttgtcatggtatacccgccgggaattccgatctttattccgggtgagattattactgaagaaaatatcagctacatttttaaaaacttggacgccggccttcctgtgcagggtcccgaagatgcaacgcttgaaatgatcagagtcatcaaagagcaaaaagccatccaataaatataaagaagcccgaaacgaaatcgtttcgggcctttttacgctttttactcttcttcaagatgacactggcattgtccgcagcatgttccgtataacgtcgtgaccttctcatcctcaaagtaatgaatcgcttcgttacagtcttggcaaacaattgtacccatctgtcattccccatttctcagaatttgaaaacgcttaatttttacttgttgttattatattattatgtcacatttaatatgtcaactgataaattgtataacacatttattttttacggtctttttatagctcgagggtcaatcacggtatatcctttatgacgcaatccttttacaatgtccggcatggcttcagccgtccatttccggtcatgcatcaatatgttggccccgtcccgcagataaggactgctcagtgtgatatcggtaagcgcttttttggattgatatttctgatcccaatcatacccgaaggtccagttcattttcaccataccttctttttttataagtctgtcactgtagtccgtattgcttccgaaaggcgccctgaaaaatgcgggtttctctcctattaccttttcaaccgctttattgacgctaatgatttcttcccgttgtttttgttcggaaagatcttttaagttttgatgagtcattgtatgattaccgatcataaaacctaactcatgaatatgcttaagcgctttcttattttcatcttttttcaaaaaatgtccgtttacaaaaaagatcgctgacgcattgagatcgtgcagtttgtccgcaatctcagcggcatgctgatcaggcgcgtcatcgatcgttaccaatgcgatcggttttttctctttctgttcatccattttttccacagaaaagcttttcggattgatatagtaacggggctccgccttctgttttttctgtttttcctcttttgtatggtggttttcccgtttggcatgattggccgcggcttgagaatggggtttgtttgtttgcatcttttcatttggttggcagccggcgagtaagcacatacatatgacagctgcagcggctttatacatgacaatccctcctgatatggttttgctcccagtataacgaaaaaacagcgctctcacgaaaaacaatgtgccttttttacacatcggctgcgcaagttgtcacacgtattatttcttcattaaaaacagtttcaattatataacaattcagtaacaagccttaggtttttcacctctcgtgatacacttgatatagtccttataaatggatgaacccatatattatataaaacagaggagtaagatagatgcgctaccgtacggtgattcccttttttttaatgctgttcgttctgtcaagctgttcggtttctactgtcagtccattcacaaaaaaccggatcgacagcattcatcacactcaaatcttgtttttttccgatgaaaatcatatagataaagaagtgccttattacgatgcgatccttgatttagaaaagaaatatccccatcatgtcgatcaaatgaaggtttatgacaacagaaagggatgggaagaggaaatcaacacgttccctgcgctgatggtgatcaatcatcggcatgtggtcatgaagattgagggatccgtaaagaaaaaagaggatatcatcaagcctatgcagcatgtgcttgcacaataaaaacagcccccgcttttacaaacgggggctgtttctttgttacattattattttacgatatggatcgggcttccgattgctacttcggcagcttccatagtgatttcgcccaatgtcgggtgagcgtgaattgtcattgcgatatcttcagcagtcattccgccttcgatcgccaggctcaattcagaaatcatgtcagaagcgcttgcgccggcaatttgcgcaccgattacaagaccgtcttctttacgagtgatcagcttcatgaagccgtcagtttcgttaagagacagcgcacgtccgtttgctgcaaacgggaacttagctgcaacgacttcaatgccttcttctttcgcctgtgcttcagtgtaaccgacagaagccagttcaggctcagagaatacaaccgccggaataccgaggtaatcgatttcagccggctctcctgaaatagcttcggcagcgattttaccttcgtaagacgctttgtgagccagtggaggtccgtcaatgatgtcaccgattgcgtaaatgttcggtacgtttgtgcggcactgcttgtctgttttaatgacaccgcggtcagtcatttcgataccgacttgctcaaggccgagctcatcagtgttcggacggcgtccgacagtgattaatacgtaatcagcatcaaccgttttttcttcgccttttacttcgaatgtaactgttacgccgtcaggtctttcctcaacgcctttagccatggcgcttgtatggatttcaacgttgccttttttcttcagtctgcgggtaacgagagaactcatttgtttttcgaagccaggaagaatttcatctccgccttctaaaataaccaattcagttccgaagttcgcatacgctgttccaagctcagtaccgatatatccgccgccgataacaacgagctttttcggaatttctttaagcgcaagtgcgcctgtagagttcagaacgcgttcgctatatttgaagtttggcaattcgatagggcgagaaccggtagcaatgattgcgtttttaaatgtgtatgtttgcgcagagttctcatccattacgcggacagagttgctgtctacgaaataagcttccccttttataacgtccactttatttccttttaaaagacctgcaacaccgccggtaagcttatttacaacagaagctttccattcttggacttttgtaaagtcaaccgttacgttctcagcagtgattcccatgtcatctgaatgttttgcattctcgtaacgatggcctgcattgatgagcgcttttgaaggaatacagccgacgttcagacaaacgcctccaagagttgctttttcaacgactgttactttttgtccaagctgagcagcgcggatggcagctacatagccgccgggtcccgcaccaatcacaagagtatctgtttcaatagggaaatctcctactaccataacattacgcctccattaaaataagttgtggatcgttcagtaaacgcttgatgtggtttaacgcattttgtgcagttgctccgtcaatcatacggtggtcaaagctgagagaaagagctaagacaggagcagctacaatttcaccgtcacggacgattgctttttcagcaatacggccgataccgagaatcgcaacctctggatggttgataaccggtgtgaaccattggcctccggcagaaccgatatttgtgatcgtgcaagaagcgcctttcatttccgcaggtgcaagcttgccttcacgcgcttttgtagcaaggctgttgatttcatcagagatttcgaaaacggctttacggtcggcatttttcactaccggcacaagcaggcctttttcggtatccgctgcaattccgatgttgaagtaatgtttttggatcacttcatctgttttatcatcaatagatgtgtttaaaacagggaattttttcaaagcggatgttaatgctttgacgacgtaaggcagataagtcagcttgatgccttgatcagcagcaacttgtttgaactgtttgcggtgagcaacaagatttgttacgtcaacttcatccataagagttacgtgcggtgcagtatgcttagagttcaccattgctttcgcgatcgctttacggataccgctcattttttcgcgtgtttcagggaattcaccttcaggagcctgagccgctgcaggtttagctgtttcctgaggtgcagctgtttcttgcggtgccgcttcttgagccgctcctccatttgcaaagctgtcgatatcttcttttacaacacgtccgttattgcctgaacctgttactttacggatatccacgcctttttcacgggcatatttgcgtacggaaggcatggcgatcacgcgtttgttcggatcagcttccacttggtcctgctgtcctgcgccggtttcttttgcaggctctttaggagtctcttctttagagatatcctgccctgcttcagcagacgactgaacttgagcttcagttttcgcatctcctgaatcatggcttcctttaaattgaagatcttcgtaaccaggtgcgtcaaacgtaataatcgtttgtccaacagttgcaactgttccctcttcaacttttaattctaatacttttcctttaacaggtgaaggaatttctaccactgctttatcattttgcacttcagccagaacatcgtcttcttctacctcgtcgttcggcttaacaaaccattttacgatttcgccttcgtggataccttccccgatatccggaagtttaaattcaaatgccacagttttcgacctcctagttgattaagcaaattttagttatgcattcgcaagcattgaacctagtaaacagattccttcatataagagaaaaggactctctttaccgtcttttatgacgcctgattaaaattcaagaacttttttcgcagtttcaagaacgtctttatggtttggaagccatacgctctcagcaagcgagaaaggaaatactgtatcaggcgccgcaacacgcagaaccggagcttccaggctcagaatcgcgcggtcattgatttcagctacaacgttggcagcgatgccggcttgtttttgagcttcttgcacgacaattgcgcggcctgttttttcaacagaagcaataatcgtatcaatatcaagcggacttacagtgcgaaggtcgataacttcagcagaaacgccttctttttcaagctcttcagcagccttaagcgactcatgaaccatcgcgccgtatgtgatgatagaaaggtcagtaccttcgcgtttcacatcagctttgcctagctcgattgtgtattcctcctcaggaacttcctgacggaaagaacggtaaagtttcatatgctctaagaaaacaaccggatcattgtctctgatagaggcaatcagcagtccttttgcatcgtaaggagtggatgggataacaactttaatacccggctgctgagcgataaggccttccaaactgtcagcgtgaagttcaggtgtatgaacccctccgccgaatggagagcggattgtcaccggagaagtccagcgtccgccggaacggtagcggagacgagccatttgtcctgagattgaatccattacttcatatacgaatccgaagaattggatttccataacaggacggtaatcttgcaggcctaaaccgagagcgagaccgccgataccggattcagcaagcggcgtgtcaaatacgcggtcctcaccgaattctttttgaaggccttcagttgcacggaatacgcctccggcaacgcctacatcttccccgaaaagcagaacgttttcattgtttttcagttctgtgcgtaacgcatcagtgatcgcttgaatcattgtcatttgcgccatggcttacttcgactccttcgctttgtaaatttcaagttgttctttcaagttgaacgtcggctcttcaaacatattctcaatcagctctgttactttcggttttgattcgccgtcagcctttttgatagcttgtttgatttcttctttggcctgttcaattactttgttctcttcttcttcagaccatagtcctttgttttccaagaacttgcggaaacgtacgagcgggtctttttgctcccattcattttctatttctttcgtacgatatttagtcggatcgtcaccggacattgtatgaggtccgtaacggaatgtaagagtttcaatcagagtcggaccttcaccgttaattgcgcgctggcgtgcttctgcggttgcagcgtaaacggcaagtgcatccattccgtctacttgaacacctgtaataccgacggcaactgctttttgggcaattgtctgtgcggatgattgcttctctacaggagttgaaatcgcatagcggttattctgaacaacgaagatcgctggcgctttaaatgctccggcaaagttcattccttcatagaagtcaccttgagaagctccgccgtcaccagtgtaagtaatagctaccgcttttttaccgcgctttttaagacctaaagctacacctgcggtttggataatttgagcaccaataataatttgaggtgataaagcatttactccctcaggcatctgattacctttaaaatggcctcttgagaacaggaatgcctgatgtaaaggaagaccgtgccaaatcagctgaggaacgtcacgataacccggaaggataaagtcgtcctgttcaagcgcgaagtgtgatgcaatttgagaagcttcctggcccgctgtcggtgcatagaaacctaaacgtccttgacgggaaagagaaattgaacgctggtctaaaatgcggatatacaccattcttctcattaattcctttaactgatcatctgaaagatcaggcattgcgtctttatttacgacttctccttcagcatttaaaatttggaacgtttcaaactgcttattaatagcatcaaattgttttttgctatcaacaattgaagtttttgtctttgcagccattttttaaaccacctcttcttttgatttaacagggttaggataccgtttagccatccgtattaaaaacagtcttatcatgctctgcaattctaaaattaatcattcagaaattcacatagcgcttaagcaaagataatgacgtttaaactgtactaataaaaaaagattttttattagtacaatatgatcaacaaccatagtttacagtaattaaacaaagccgtcaattatttataacgtcattttgaaaccgcttataaaacataagatcatattacgccaaactgtactataaaagactttaaactgtattataaaaatgctctactgtactataattaaaaaaaattacaaagagtaaattaagttatttaacttaggggcgggctttgaaaagataccgcgggctaaaaacgggcagttagcaatcgtcccgcctgccgaacagacgggacgacgcttttgtcaattattcaatacccgcccacacgatattcagcggcgtcagcacggcatgaggatgaaactcggaaatcggagtgaaaaatacatacgtaaaatcttcggctggatcagaaaacatgccgcaccaccccattccaagatgtgagaaggtgccttctgtcatgaaataatggtcaccggccggccacaaattaatgcctaaaccaaagccgccttcctctctgggcgctccgaagaagtaaaaaggaagaccgggctttatttgatttctcagcatcgcctcgactgtttttcttccaagcagcttcttatctttcaatctgcctttatttctaaacatttcagctaacttccaaatatctcgcaacgaagagtacagaccgcttgtcgctttattcggaaaatacgggtgatgacttttttccagctgtacgcactcgtgctcattgatcacacaaacttcttcttttaaagcatcaggcacataaaaatacgttctttctaatccgagcgcttcaataatatgctttgttacatactgttcgtaggatacgcctgttacttttgaaataatgatgccaagtataacaaagccggttctggaatagttccatgcttcatccactccgtactccaaaggcgtactgaccagatagtttatccattcttcctcattcgttaagtcaatgccttcagccttttgaatatccagctcaaaacttaatcccgccgtatgagtcaaaaggtgcaaaattttaatttctccgaaacccggtttatcaaacgcaggcaaaatgagcttgaccggcattttcagatcgagcaaacctttttcgacgagctgcatgacggctacagcggtaaacacttttgtcaaagaaccgatttctctgattgtatcaagctgaaatgtttgcttttctttttgtccgccggtaaattcccctaacgactcagctgcaaaaacctcacctcctcttgacatcatataactcgcacattgcagaactccattgtctatcatcgtctgataatggctgttaagagcgttaatttgtttcatatcaaatgccggattgcttattgtttgtttcattgttttctccccctgtactgtatgtatcgttttcatcccttacttactgatttcttgatgaattctgacaccgctttattaaattcttccggatgtgtgatgttcggaagatgccccgctcccttaattttctttaattctgcattgctcagcagtttctgcagcctttttgtttctttctgatcaactacgctttccttctcacccgtaaggataagcgttcttgtatgaatgtcttttaaaaagccgatcgtagaatagccttcttgttgatgtatcttcataaaacgttcaatagaagcatttaaaaattgattactgtataaactttcatattcatgcgattttcctatagctataaaatcatttttcagtttttcctcgacactgctttcagggtcttcttcgtattcggtgtaacttccggaaagaatgagtgtttttactttttcagggtattcataggctatcctctgccctatcatgcctccccaagaagctgccgcaatgtggatcggccacgcaacccctatctcgttcagcacttcgataaaagtctgagccagcccgctcagtgtaaaatcggcgctcccctcactcagcccgtaacccggtgtgtgtatgacaattacattaaattgatctgcccactctttcatttgttctttccacatgtaagcagtggtagcaaaaccgcaaatcagtaaaattgtttcacccttaccgctcatcaatatttccatatgccgggcattttctgtgtttgccagaaaatgaacggtttccgtttcttctgtctggtaaaaagcgatgagtttttttgcggcatcgctttgattgtgctgaagggctcctttcttcagtctgctccaataatgcaaataatcgtcgagatgacgattggaagccgtgccgagtatccggaaaggactttcagcttccgtaacgattgacgaagcatcaaaatcggctgcaatcgctgaatctcttaccagaggcggtgctgaacgggcggataacggcttgaaatcgttttgtattttttctttttctccgtataacacgatcagctggtggccttggccgagaagcgagtgttcaaaagctttgattccggcagtattttctaatgggtgaagtccgtactcccttttcataatatcttggatgccgggatcaactgacatgcctccgtctttccagaaaggccaatttacagcgatggtttttcctgatcttccccccgcctttctcatacattccctccactcggcaaaatgctccagaaaacgattggcgtaggcataatcggcttgacccagacttccgatttctgaggagatggaagaaaacaaaacaaaaaagtctaaaggcatatctctgagcgcttcatccaaatgaatcacaccattgacctttgattgcagcaccgcttgagcttccgcgtctgttttgttcataatgagagagtcttttaacacgcctgcactgtaaatgaccccgttgatttcggaataatcagcacgaattttttccgctaacttgatgacctgctgcttatctgacatgtcagcctggatataagaaatgcttgccccgtcatatcggatgctgtctaatttttcttccatgtctgctgtcattttcgatcgcccggcaatgataacgctggctccgtgatttgcataaagaaacgctgaaataatccagccgatgccgcttaaccctccgatgatgagatacaccccgttttttgcaaactttgcggccttttgtcctgtttgcagcgaagcgtctctatatgctgtcacccaccttttttgatcgccgtcatatttcacagcccgatgatgtccggcacttaattcattgagaagcaaaggtgctttttcaatggtttgtcttgaagaaatctcaaccgttttacactttatattcggctgctccgcattcagcgttttaaaaaagcctccaatcgcggcgtaaaccggatttgtatattgatccttgtcatgtacgtacagaatgttgatgttttcttttgttttttgacggatcaaagctttacttaaataaaggattgaataaaagctgtgagtcaggtctaacgccgcttcagtataagctttttttgacaggtaatgaatgattgacgccggaaacgctccggactttttcatatcatctaacagtctggtgtaatgagcagactgctccgggttaaatttataatgcttttcatttaccatttcatattcagcggcggcttccgcataaataacattttcactgccggtgtagttgcggatttcatcactcaatgaactgtcgaaatcgaaaatcaaagtattttccttagacacttctccggactttaatggcgactcaatccattctttttgtaaatacaaagattcaagcatcggcttttcagacggctctttcgtttgcgttttttctttaaaagctgcagccggtgtattacgcacatcatatttttcttctaaataagccgctaaatcatgaatattgttataatcaaaaagcaatgtcggatacaattgtgtatccaatctttcctcgagcattttcgatatatgcagcagctgttttgagtcaagacccagttcgtaaaaagattggtgtttgtccgctttatttggcggtgtgtttgtaacctctccaataatggatgacagctcatctgttaatgttttatgactgtcttggtgctgaactgtatcagagatagagtctgtcatgtcggctccgtatttctcctgcagatattccgtcaattcaccgattgtggagtaatcaaataataaagtcgggtacagctttgaacctaacatcagttctaactttttggataagtctaataattgtttagaatccaagcccatctcataaaaggaaatatcattcttcactgtttcagcaggtttttcaatcatgccggctatctcttggatcaaattatttctgattatttctttatttttcgttgcgctgccgacctctttagctttttgggaatgctccagcctttgtattgaattttcatttctgactcttttcacaccgaatcgctcataataaaaagcaagctctccatcaggcctgtatacttctatgtccgcatataaaatgtctttagaaggcggctgcgttatactggttttattaatatacacaaaacaagacccagttgttttatgcagtgcccggaatgtctcaatatatatagggataaacgcatttgttccttcatccggcaagtctgatgtaaggattcccaacaagctgagagacccatccaaaaatgcgggatgcatgtaaaagtcatctgtatattcttttgaaagtccgcttaaactgacctctcccagaatataattttcaccttcatataccgtaccttccaatttcataaaatctttatgaatcaggccgcccctgcgcaaattacgataggcggattcagcatccgaagtccggacggcccctttctttaattcttcgattgaaattgtcttttcgtttatcgcattttttcttatgatttccgcctgcaagttgactgacgcttcaccttccgctttttcagcgacccatttcctgcttgttgtttcaacaagccagccgttttcttgttccgtaaactggaaggtgacttttttatcaaaatggactgacgtcgcaacaggttcacggaataaaacatgtttgatttcaaaacttcggggtgatatccctttctcagctaaaaatcgtgttattaaatccagatacgttacgccgggtatcgtacgcacttgatgaaggacatggtctgaaacaatataatcgtcatgtttgactaatacgctgaacctcatgcaactcgacaacctttcttcttttacaaagtaaagaaacagagcaggtgctactctgtttcatcaataatttcaagaagccgttttttattctgtttgatttgttttttccgatttgaatccggccagtactcttttctgacaaactcggcaggcggcagcggagttctgacggaatgatatgaatcatccaggccgcttaccaaaaggtgggcgtttgttccgccaaaaccgaaagcgctgatgcccgccctccgttttccatccttccagcttctcagctctgtattcggataaaaaggcgacttttcaaattcaaagcggggatttggcgtttcacaattcaatgtaggcggaatttccttatgccatattgataaaatcactttaatgaaacttgccgctccggcagcgcttaataagtgtccgatattggtttttacacttcctactccgcaaaattgcgttttgtttgtgtctcttcggaatacttttgtcagagcctgaagctcaatcggatctccaatcatcgtgcctgtgccgtgagtttcgacgtagctgactgatccgggagtgatatcggctttttcaaatgcatcttgaataacctgctcttgaagcttaggattcggggtcgtaattcccattgtcgcaccgtcgttattaatagctgatgcttcaatgataccgtatatccgatctccgtcagctttcgctttctccagcggttttaacagaacagcgccaaaaccctctccgggtacaaaaccgtttgccctttcatcaaaagtaaaacactgaccgtccggcgaaagagctcctccttctgttaacatcaggtaaggaatttcatccaaaagcagatccgcccctcctgccagcgccatctctgaatcaccgttttttatgctttggcaggctaaatgaatgctgactaatgaagaagaacaagcggtatcagaaaccatgcttggaccgtgaaaattaaagaaatgcgacacatgtgaagcaataaagttttgactaagcccgacgatgtggctgctgctttctttcggcagtttgtgaccgtagccgcccattctggaaccgacaaatacgccgactttttttcccgataattccgtttcttcataaccggcatcccgtacagtctgtacactcgtttctaagaaatgtcttatcagcgggtccgtttggatggctttctcctcttccatgcggaaatactccggatcgaagctgccgattccattgataaatcctccccatttgctgatgctttttcccttttgctgcaccggagagtaattttcttctatattccaccgggaatcaggtacttctttaatatgattcttcccttttctcagattgtcccaaaattcctctttatcagccgctccagggaacttacatccgattccgataacagctatctttgcagaggaagccgtctgcggttctgtatttcggctcgtcacagactgcatatcttgctgattgctgctttgagaatcagtctgttcgatttgtttcttcaacggcggcgccgtcttaccgatatattccgcaagaccatgaatcgtgttgtgttcaagaagcacagtagggtcaatttttttctgaatcattgcttctattcgatgtataatgctgacaagaagtatagaatccacaccgtattcctgaaaatccgtatttgggttaagcttttcaaggggaatgctcaattcctcggcaaatacggcagaaagttcactgacaagcccttctgaatgattaaaagtgtcgggagtctcctgtcttcggactggaaccgaagctccgccggttttattgatgttcaggagactgtctgcatgaaacactgttccttttttcacgataggaatgatattggctgattttttctccagtgcatgatacaaaatcgccagtccttcccgtgtggatagagagtccagtcccaattcatcatataaaggactcgtcacagtacccattccgacttctttccagctcggccaattgatggacgtgaaatacgttctccccttttgaaaatgataagccgcgaaatagtccatatatgcgtttgcagacgcgtaatcagtcattcctttcgacagtttgggtgactgtgctgcaattgatgaaaatagaataaagaaatccagcggcctattattaaaaatccgctccaaattttgaagtccagtgactttcggcccgtacaccgtcttaaattcactcattcttttatgaataaatgccggatttccgccgctgtgcagtccggcacagtgtatgacaccgcttatatctttaaattcaaggcttacttggtgaaagaatgaacgcagcttctcttcatttgtgagagaaccgctgtaatacatatagttgacacctttctcttcaaaactttgaaacagttttatattgctgactgtcttttcgtcctgtctgccctctttcagcaaatgatcccattcacttcgcaaaggtaatggacgcgtacccgtcagcacgagttttttcactccccgtttcaccaaatcttcagctattgctctgccaatgccccctgtcccgccggtaatcacgatggctttatccgcaggaaatgaaacaggcccgccggtatggattctttcttcttcaaaatacggaacatatctgacgccgctgcggtagcatacttcattttctccggtacattgcctttcattctcaaagatttgtttcagctcatgcgtttctttcatgctgtctatatctattgttttcacatgaacaaagccgtattccgcagaaagggctttcagaaaagccgctgattctgcccccgtcagctttggtttttccgctttaaatacctgcaagccattggtgatttgtaaaatggataatggtgtttcctttttactccgcttaattatttcttgtataaataagaatttaccatatgggatgccgttctgattatcactctggtttccgatatctgagaaatcaattatattttggacctgccgctcaccgcccgagaagatctcacggataacgtcgtatgcgtggttttcatctaataaagaacactcaaacatttgatcagagtgttttataaatgaagagtgatatttgatgacaatcagattctcctgatctatatccgaacaaatagagcgggcaattgattctgtgtcttgatttacaaatgctactgtcagtccgtactcttttgtttcggatggatttacaaacggattctccctccattttttttgcaagtgatgttgaaaagaatgctgagggatctctgtcttcttagtcctggacggaacccaataacgttcttttgcaaacggataagtcggaattgagatccgtttacccggctgctgtaaatgttgatgaacggatttccagtcgacatccgccccccaaacccataattgagccagcttttccgcatcaccgttctcaataatagtctttacaaacaattcacctgctgtgccttccgttaacaccttcattttttcagcaaatgcatctgctgattgctgatgaacatatacgcctggaacttgcttgtcaccgcggcaaaactcaaataatttatctttcatttctttaagagacgtaccggtaatcgccgctctggcctccatcgcttctctgcccgattgtgtagtgtatgccagatcccgtaaaacgacgctttccgattggctgccttccatcacttcattcgggaacaggtttcttatcgctccggcatattccttcaataagtattcagtaaccgcttgaatggaggggcaatcagttaattcatacatcgtgagttcaatatgaaacatttcgttaataaaatccgccatccggcttaattccaaaggccctacgccaaattcactcaggtgatcagcaatattaatttcttccggatggatatgaagcaattccgaaacaaacggtttgagtacttcatacaccttttctctcatatcaggctgcttatcctttacttcaggacttagtgaacgttggataaaatctctcatgttttcggcatactcaagaagacgttcattgtctttggcagataacaggacaatatgcggttcgttctcaacatgttctgttgagacgtttgtttcttcatattcttctataatgatatgaacgttcgttcctcccgctccgaatgagctgatccccgctcttctcggaacagttactgtttttccgttttcctgcagttttggtttcttccaatcttgcaatgaccgctgtacataaaagggagatgctttaaaatcgatatttggattcaacgtctccgcatggatggaaggaaacagttttttcagtttcatttgcaaaagaacctttgtcaaaccggcaattcccgctgcggcctcaagatggccgatatttgatttgacagaaccgatggaacaatattgagtgtgctccgtaaattcccgaaacgcttttgttaacccggtgatctcaatcgggtctccaagagaagttcccgttccgtgagcttcaatataactaattgtacgagggtcaatacaagctttctgaagcgcttcctgtatcagttcagactgaccatttggattaggaaccgtaaaaccgtttgttctccctccgtgattgaccgctgtcgctttaatcagcgcataaatatgatctccatcccttaccgcttccgccgccggctttaaaagtacggatcccactccttctcccggtacataaccgtcaccgccttcgccgaatgtacggcatcggccatcacttgcaaagaagcggctttgatttaataatgtatatttattgggatgaagcgtaagattgaccccgcccgcaacagcaagtgtgctttctcctcttcgtatactttcacaggctaagtgaatggcgttaagagaggatgaacacattgtatcaaccgccatactcggccccttaaagttaaagaaatatgatattctgtttgctattgcagaaaatggagacccgacggccagttcatttcctttaagtgattcttcaacgccgaaaaattgatagcttccatatgtgacgcctgcaaatactccgacctttttgcgggtcagatctgaaggtttataacccgcatcctctatggtattgtacactgtctctaaaaagagacgttcctgaggatcaagaaaagccgcttctttcggtgatatccggaaaaataaaggatcaaaccggtctggatttttcagaaaacctccccacttatagcagcttccctccagcatttccttccggtcatcaggaatttcgcttacgcaatcccgtccattcatcagcacattctggaactccctgatgttttccgcgcccggatacctgccgctgacaccgataatggctatatcagcagaaaggggatcggccgccatgtgctcttttgaatcttctccttcagagcgtaccggcgcttttgtttccactggttttctttttggctttttttgatatgagacaagttcagatgtgccggccggtttcagcagtttcatcattcgttcgctgtgatgactcaggaaatattcggctaactgagatattgaatgatattcaaaaaataatgttttcgacaatctgccgatactttgctccagctttttggtcagacgcatgatcattactgaatcaatgccgtatttctccaggtattgtttttcatctatgagtgagaccggtaatttcaattcctctgacattatatttttcagataactgatgatattttgtcttaattcatcgttttgcaaatcggcatcttcctgctggtctgaatgtaagctgattgtgccggcacgcttcagcacatcctcaatcttttctttacggcctttcagggcaatcagctgttcagatgattgacacaagctgttctccagagcctgtattccgtcaccgtcatctaacgggtcaagaccgagttcctgtttcatgtaggatattccttcatcgtcaatattcatcccgccggaagtccatagcggccaattgactgacactatcctttcggcagactcttttgcggtcataactgctgcatactgatccaaacaggcattggcgaaagcatagtcacattggccggctgagccgaagactgcggatgtggatgaaaacaagacaagtaattcaactttcatttttttgatttcttccgccagccacagcgtgccataaactttcgaacctgtgacttgatcaatttcttcttttgtctttcttaagataaaagagtcacggagtacgccggcactgtgaaatactccatgtaaggtgccgaactgctcttttgcaaaagcaaacatccgttcagcatcactttgttttgaaacatcagatcggatatattcaactgttgaacctgaacttcttaaatattcgatctttttctcctgctcttcagttaaatcagagcgccccgtcaatatgagattcgctttccatttttccgacagatgttttgccagaatataaccgagaccgcccaggcctcctgtaatcagataattcccatgatgtttcagcggctgggttaaatcgaatgagccggctttattatagcttttcgtaaaacgtctgccgttttcatagcgcacttcaaaatggatatcccgtttttcgtcacactctctctgatatatatccgctattgctggaagagcggctcccgcaccctctgattgcgtgatattgataatctgatagtgaaaattggggtgttcctggtgaacggttttcaccaatccgccgagagcatgatgcagcggcagttgttctttattctctgtttgaaaaatatgcgtcagctttattatctttttccattttagttcaatcagcgcctgtgtaatatacagaagagaaaacaatccgttttccaattgtttctgtataccttccttcctcatgtcagcctgagaatcagaccacaagtgaagaatcttttcgggcagctgataatgatcatgaatgtatcggaacagctttagataatcgtcttttttcacgtggttcatacaaatcgtatcatcatgtaaaacagcaaattcttttccgcggataacaaacaagagagtacagtccttaaacaaaccgctcaattcttgtatttgccgttcattttctgcaaaaatcaggagcaatcccgtcaagggtacgctcttcttactcggaatgaacgattcagtccattccggcttgtaataaaaaagcggatggttcgatgcccgtgatttttgattctgaatggatgtcacacgggcatagccttcgtcagccgatatctgtcctgattgaatcagatcaagaatatcgctgatttgttcacgttttccgttcatcattcttcccccattaattgtttcaatacagccttctgatcaatatcattggtttccaattgacgcaggagacgaatgagttcgtcgtccgtctgaacagtgtctttttcatgaccatatctgaatctcacatctctgcactctgccagaatgcttccgttttcatctgtaaatgtcatatgacacgttacatcacggctgttctgccggttctctttttgagtatagacataaaaattttgagcgagagggtgatagacatccgccgctcccattccgatcaaatccgggaaggtttcgccgctgacaaaaaacgcactggcttgaatcgcggactcaagcgcttcaggagagatcgtaaaattctctctttttgcataaagctcatccggcaatgaatgaagcgacagcattccgtcactgtttttcgctgattcaatgacaaaaggcgcttcagccggatgttcagtcatttttgattttacttcagcaatatcaagcgcttcaggaagcataccgctttcaggcttaacaatatgcgcatttcccctggcaagacgtactttattctcattttttgtgtttgcatatatgtcaaaccgcgcaaagtcgcgctcaggcgtcagcgtaatcatcagttcccttatatcagtcattccgttcatgctttcggtccacaataaatcagtcaatgtttgaactggttgtccaaatgccgccgctgcattgacgatagccatttcagccaaagatgcataagggaaaaaggacacgtttccttcagacagacttagtgcgaacggatgattacgggtgatttttttcgtgaaactgaactgattaaaatcggacgtgttactccccaagaaagggtgacccggcttactcatatccgctgaaacaagcgtttcccctttttccgctatccaataccgctgtttgatcagcggttgtcccggaatagaaatcctgcgagcattccgattcacctcaaaagtctcccaatctatctttcttccatttacccatttggatgctgcttcggcgtaatctgaacaaacgtgaggcatttcattgtgaacttctgattcgaatgtattaccggtatagcttaagctgcttttttcacccctggtataagctgaaagctcttcagcaatgacccgcccggaatctgccactatcgccagccgttcttccatatgatcgcgtcccgtctgaagtgtataggcaatatcctgaagacgcagtttatgattgttatccttcgattcattttctgatagaaaatcagccataaccttcgcatattttatcagccgttgcttgtcttgagccgataaaacaaagatcactcggccgctttgatgatcaaaagcttttggcggctcatacgcttccaatataagatgcgcgtttgttcctcctgccccaaaagcgcttaccccggctctcaaaggatgaacagcattgctgttttgcggaatattccattcagccgctttccgctgcacttgaaaaggaacctgatcaaaatctataaacggattaacaatatcggaatgcagagaaggaacaagctgcttattcttcatttggagaagcactttcgttaccgcagcgattcctgccgcagattctaaatgtccgatatttgatttcaccgaaccgatggcgcaaggatggttcaattgataggaatctttcagtccttgaatttcaatcggatcgcctaatgacgtacccgttccatgcgcttcaatataattgacggtattcggatcaatgtcagctttacgaagcgcttctgaaatgacctccgcctgcgcatccggattcggtatggaatacccgctcgtctttcctccatggttaacggcgcttcccttaatcacaccgtatatttgatcttgatcgtctattgcttttttcaatggttttaacaatacggccccgactccctctccgggaacataaccgcttccatcttttccaaaactccggcatctgccgtcacttgatagaaactgtcccatgctgaggaacttatatttattcggatgtattgacaaattcactccgccggctaatgccatatcgctctctccgcaatgtatgctttggcatgcgtaatgaatagaggtcagtgatgaagagcacattgtatccagagccaaactcggaccttttaaatgaaaataataagacacccgattggcaattgaagaatagacggacgccggcgagaaagccactccattttcttctccttcaaatagttgatattggccccacattgcaccgacaaatacaccgactttcatcttttccagcatgtttctcgggtaccctgagtcttcaaaacaatgtttggccgtttctaaaaagagcctttcctggggatccataagttctgcttcccttggggaaatatgaaagaaaagcggatcaaattgatcggctccgctgataaaacctccccacttgctgtaagacttccctttcatatctctgtcttcgctgaagaaatcatccatattccagcggtcaggcgggatttctgtaatacaatcttttccgctctttaaattttcccaaaattcaggtaagtcttcagccatcggatacttcccgcttaatccgataatggcaatgtcctcatgccttgtatcagctgtttcatttatttggatctcacggctttcatcctctatgaaggtatcttgaagtgcagattccaatttttctttgtcaccttcaaacacgatcagctgtgatgcgttcagagagagtgaatcttgaaaagctttgatcccattggttttactaagaggaaccataccgattttttgtttcatccatttttcagtttgtttatccactttcatgccgccgtcttcccatagcggccagccgatggctactgagacgccggagcgttcttttttccgcctcattccttcacgccactcagcgaaaagatcgatgaagcggttggccaatgcgtaatccgtctgtccgatattcccgtacatcgaggtgcttgatgaaaacatcacaaagaagtccaaaggttcggtttgcagcaagctgtccaataagaccgtcccatttattttcggagcgattacttcctgaatttcatcttttgatttttgaatcaataaagcgtcgtgcgtcacaccggcactgtgtatcacaccgttgatttccccaaatttccttttaatggtttttatgattcgctctgcatcgcggctatctgaaaaatcacctcttatatattgaaacgaagaaccgcctgctttcattcggctgattttgttctttttgtcttccgtaagttcagaacggcccgctaaaataatattggctttcgtttgggctgcgatatgttctgcaaatataaggcctaagccgccggcccctcctgtaatcatgtatactccgttttctttaaaggagaaatctgagtttggagccggttctgcttcccgtaaggcacggacccagcgcacatttccttcataataaagatcggtttctcccggatgcgcttccgtagattcgactctgatgatttcagctgtaagttccggcaacgatgacttgtctgaaactgatatcccgattgtcttaagggccagtttcgggttctcaagcacaatagactgccctgcgccatggactgaagcgtaaagcggctgatcatttttatgatccgccggataaaggaaaagcgatacaacctttttttccgtcttgctgcgcatcaatgcccggctgaaaaagaatagcgggtaagcccccttagaaagctgttcacttattttttccgggccggcaaatgacccttccggccacccgtaaaccacggtgtcgggcatttgccccctttttttcagatcagctgcaagcctgtcaaagtgagcttcctccctgtgatctatctcataaacaccgtctccgtgataggagaaacgattccctgataaaacgagaatgatctgtgtattttcgaatccattttcagcattttcccgcataaaatgaaaaagctctctgtcatattgaaacagcaggcatgttcttttctttttatttccgcaattcgggtcccaagccgcagccttttgtctccaatgcggcgttaaataggtcaaagccgtatgattctctccatgatgaagagggaggtctttttcaacggaagttttttcgccgctctctgcaaaatagtttgcaagtttttgaatcgtcggatactcaaacaataaagtagggtacagttccctgcctgttttctcttccaatgcctttacggcttgcataagtgttacggaatcgaggccttgttcataaaaaccttttacaacagagagtgtttcaggggcagtccctttgatatctgcaatcagctgctgaatgtctccttctgttataagagcggaaagattttcgttcttactttctttcatgtcaggcttttcagccggttgatttcgcgttaagaaataactggacattctttgattttctttaatatacgcggcgagttcccggatcgttttctgctcaaacaggagtgtaggatacagctgttcccctgttttgttttcaagttctttgacaatggcaagcaaagaagctgaatccaggccctgttcataaaaaccaatgtctgtccttatgtcacgcagatctatatttgaaaccccggatattaattctttaaggtgtgtctcgatgctttcgcttcgatttatgattgaatcttttctgatcaggctgtcttttggctgagaagccgcttcagtttccaaacgagtctgcttcaggttttcaattaaatcttttgagcgaatatgtttcacagacagccgcgtaaaataagcgatcacctccccgtatgcatcgtacaaaccgtaacttacttggatgacatcccctgaatcatgattttggtcttgcttctctatgtacacataacacctgtcttccaggcgcttcgccatacggaaagattcaatatggatgggaatatacgttttcatccggcttgccggagatccttgtgtaaaatattcgggacatgcctgataaaggatcgatatgatggtagacgcatcaagaaaagtgggatgcaattgaaaatagccggtatattgattggcaatttggctgagcgacaactctgcaagtacagaatgatcagacgcataaaccttccccagactcttcataaattcaaaatgctctatatcaaccttttttaaatagtcataacatatctccatatcggcttcacggacggaggcatgtttgatttcatcgatatgaattgacctcatgctttccgggaatttctgcatgagcctgcaggtcatattctcatcccagctttcatccaggatgcggtcatcttttacctttctgctcttcgcctgaatttcccatccctgttccaatccctgaaaacggatgcggatttctctgtcaaaggtatccgatgttgctacaggttccaaatacaaaatattctggcactcgagttcttcaataggcaaacctttgctcagcgccatacggtatatcatatctaaaaatgtgacaccgggtataatccgggtgccatgcacccggtgatccctgacaatatagtccgtatgtttaattgttaatgtgaactgatagttttgattactggccacctgtctcattccttttcttttctttataattctttgaaatcaagtaaaggaatcagcaattctgactcttccttttctggagtttctccattgtcgatccagcattgctccttattgaatataaccggagaaagcgggtgtctttttgtctctccatatcctaatgtgagatggctgtcgctcaatatcatatgtgcgttcgtgcccccgaatccaaaagaactgattccggctctcaaaaccccttttctgggacgccattcttttaaagacgtgttcggaaagaatggcgactgatcaaatttaaaacgcggatttggcgttttacaatgtaatgtcggcgggagcatctgattttttatggataaggcaacctttataatactcgctatccccgctgcgctcattaaatgtccgaaattcgtttttacgctgcctactccgcaaaattgcctttcttccgtaacctcccggaacacttctgtcagcgcttttaattcaatcggatctcctatcatcgtaccggtgccatgcgtctcgacataactgagagtatctgcatcaattccgccttttttcagggctttttttatcactgcgctttgcgctttcggattaggtgttgtcattcccattgtctgtccgtcattattaaccgcggatgagtcaattaccgcgtaaattctgtcaccttcggcaagggcgtcatcaagtcttttcaaaaggactgcgccgcatccctctcccggtacaaatccatctgccttctcatcaaatgtatgacattttccttcaggtgaaagcgcccgagcctcactcagcatgacgtaaggcttttgatccagcaaaatgtcaactccgcccgcaatcgccatatctgactcttttgacatcaggctttgacaagcgagatggacgctgaccaatgaagaagaacaagccgtgtctacaaccagattcggtcctttcagattaaaaaagtgtgagatatgcgcgcctatgaaattttgtcctatacccacgatcgtattttttgaaggggaacctattttggacataaacgtcccggtccgcgaaccgatgaagacgccgacttctttgtttgatacttcttcttttgtatagccgccgtctctcaatgtctggacgctgacctcaaggcattttttgattaacggatcaagctctgatgcctcacttttgttcatattaaaaaacgcgggatcgaaagactcaatatcttgaagaaatccgccccacttactgatactttttcccttttcataggtgtcagagtagtatgaagaaatatcccatcgcgacgccgggacttcgcggacactattttgtcctttcttcaagtttgtccagaacgtttctgtgtccggagcatccggaaactcacagcccattccgataatagcgatttggttcagactggtttgttgtatttgagatctgctgtcccgtacttcggaagcattttgatttatatgttgctcttttttccgaacctcaatgttttctgaatcaatttgaggactgatcccctcacttgcaaataattcgtttaaatagacgcccagttgtgaaaaactcggatactccagaaaagctgatggttcaatttttatttgaaatgcatcttccgcttttttgacaagctgaaccagtaagattgaatcaactccgtaatccgcaaaagacgtatcctgatctaaattctcataaggtattttcagctccgcggaaaaaatctccattaacttcctgatcatagcttcattgtctccctgaccagagatctctttttcttcagcatccgggttatttatagcagcttgaattcttgtctgaagcagctgctgcagcttgaatttctccggatgtgtctttgccggtataaggcatgggtatccgtttatcgtcatcatttcatccagcatggcaatacctgtttctgttgagtgtgaaagtaaaccaagtgcctgatatgatggacttgtcacctcgcccatcccaatgtccttccagctcggccagttaattgattgataatatgttctgccggctgcatgctgatacgccgcaaagtaatccataaaagcgttcgccgcggcatagtcacttgttccggcgcctaataaaggaaaggcgctcgcaacagatgaaaacaaaatgaagaaatcaagtttgtcatcaataaaaatgtcatggagtacctgcatcccctgcacctttggctcaaatacttctcttatttcttgatcagatttatgaataaaagccggattcgaatgattggctgcaccagcgcaatgaatgaccccgccgattttgccgaacttcagtctcacctctgaaaagaagcgatgtaatgtttctttttccgtgagcggcccggaatacacttccacctgaactcccttttgatccaactcatgcagcagttgtaatttcgaataaagaggtgacttttcatcggtgtcttttaacatgccggctattttatcagattccggaaggtcggttactcccatcaatacaagttttttgactcccttgccggcataatgtctggcaagttctgctccgatccctcttgttccccctgtaataaccagggtttgatccgtacggcatactggcagaccggatagtttccggtttatttccgctgcatgtaatttctcgacgtatggaatataacgttcaccgttccggtagcagatttcactatacagcccgtcagcgtaagcttcatctgtgattatctgtctcaattcctccgcagtcccgacatgaccgtctacatctattgtttttgattttatcttttgatactccgcactcagcattttatatagtccggctgtttcggctccggctaacgacggcttgtcattcaaaaatgtctgcagccctctggtcacatgtaaaacgaaaagctgtttacgtgtctttatgatttcctgcagcagtggcagcttcccgattgtgccggtgcgtgccccgttttgatcactccgcaaatctgacaggtcaatcatgccgatgatttccggattttcttctatgaccgctagagccgtttttttggcttccccatccgaatgatcccagttatctgcgcaaatgacagcggattcaatcagaggatctgaatcaaacaattcgaatgcaagccgctcactttcactattagccaggatcatcacctgtcctttcgtaaaagcggagggcgcagccttttgttttttccacgatttttttaatacatcaaatgataagtcaatcggtgcatggggcagactttgcggtacacctgtttttttctgtttctgtgcagcttttgcaacaggcacccaatatctgttccgttcaaaaggataagcaggaagagagataagcttcggtaattccgcagtgtacatctcttcccattgaacgtctcctccgttcacccagtgaatggccatttctcttgcactattaaagtgagtggctgacatggcatccttttgaccagagcctcggcgggcctttctcctatataaaccgtttaccttatgatctgaccgcaaatacatcgtcagcttattgcgaaggtcgtcaatgctgctaacctcaacagcgagccgctcttccatagcgtttctcccggtctgcgaggtgtacgcagcatcagctagtgacgtttttggccccagttcatttatatatgcatcaatcaagagtctgagccgttcttcatttttggcagaaagcagaataatttgcgtattgttgctctttaccgtttccatcttttcttcattcttatactcttcgatgataatgtgggcattagatcctccagcgccgaaagaactgatgcctgaccttctggcttgattttgcggcgtctcccaatcagtcagttcagactgcacgtaaaacggtgtttcctcaaaatcaatattaggatttaagttatcggaatgaagggaaggagcaagctgtttatacttcatttgcatcagcacttttgtaatagaagcaattcccgccgcagcttctaggtgtccgatatttgacttaaccgaaccaattgcacaacgataatcgcttttcgagctgtgcaaagctttggttaatcctgaaatttcaatcgggtctcccaaagatgtcccggtgccgtgcgcttcaatataactaatgctgtctgcatcaatccccgccttatcaagagtttcactgatgacgtttgcctgctcgcccggatttggcacagtgtatccgtttgtttttccgccgtgatttacagatgttcccttaatcacaccgtaaatcctgtccccgtcagccttcgcggcagaaagcgatttcaaaagaacggccccgactccttctcccggcacatatccgtctcctcccgctccaaagcttctgcagcgcccatcgcttgaaacaaaatgattttgtgaaagtaaagtatatttatccgggtgtaaggataaattcactcctccggcaacagcgagggtggattctcccctttttatactttcacatgcaaaatgaacagcagaaagtgaagaagaacacattgtatcaattgcaaggctgggcccgtgcaggtcaaagaaatatgacacccggtttgcgatagacgaataagaagacaagagcgcctgacgttcctcatcatctgaagcaccggctgcaaataactgatagtggctgtaggtgacaccgacaaatacacctgtcttatgccgtttcaactttttctttgtgtaacccgcatcttcaaacgtgtgccatgctgtctctaaaaataaccgttcctgaggatcaattaactcggcatcacgaggcgaaattgagaagaacagcggatcgaatttatcagcgtcttttataaaacctccccatttgctgtcatgacgggcattgtcacctgtgtgataatatttccgaaaatcccagcgctctttcggtatttccgttatacaatcttttccggaagaaatattttcccaaaactgttccacatctttcgccatcgggtagcggccggctataccgataatcgcaatatcttcctcggaaggtgcggatggtgtgcgggaaacggaaagcttctcccgtttcgccggcgccgaatgatcaattcgctgttcggctgccggtaaaaacgccttctgcaactcatgctgatagtgttcaagaaaatactctgacagctcttcaacactgctgtattcaaagaaaagagtcttagacactcttccaaaatatttttccagacgggagttaagacctaaaatcgttagagaatcaattccgtaacggtcaaacgtatcctcgggtaaaatactgtccgccggtcttcccgtttccgctccgacgatctctgttaaaagacggaccgtttgctttttcagatctttttcatgtaattgcggcaggttactgttgttttcaggtacagtctctatttctttatgattagttgagagtaattcacttattctatctttgtctccgctgataacagccagctgagaagcagagcggctcatactgtcctgaaaagcggcaagccctgcttgggcggataaaagttccagccctgcatgtcttaaagcctgcagctctcccggcccgactgtcatattgcccgcatcccataacggccaattaatagaaagtgttttcccgggacgtcccttaatgcttcgatactgggtgaatccgtccatacatccgttagcgaaggcgtagtcgctttgacccgcattaggcagaacggccgaaagggatgaaaacataacgaagaaatctagaggctcttcttcagctgctttatccagccaaacggttccgaatactttaggcgctataacttcttctatgctttctttcgttttttttatgataaatgcatccttaacaagtccggcactgtgcaaaattccgtttaattctccgaatgtctgcttaatgtgcttaatcaaagcgtccgtctctttttcctttgaaatatctgccgggacatataaggcctcagcgccgagattttcaagagcgctcaatttttgcgccgtttcacgggaggccggggaacgcccggttaatatcagcttgacttctgcctgtttcgccagatattcagcaaacagatacccgagaccgccggctcctcctgtaattaaatacacaccgttcttttttacactgaaactatgtttctccccatcttctttttttactctttgaagctgccttttataataatgcctcggctcatagcaggtaaagtggtccgtcttacattgattgttccattcaaaagagatgacatctgcaatatgctgctttgtaaacggctcgtcaaacattgatttcagctctgcagccttacatgtgaaattcggattttcggcctgtacggtcttaagaaaactttcaaccgcgttataaatcggctgaacctcgccctcggcattttcatacagatacaaaatttctgctttcggacaaagtttgttcgccatgaaggcctgaaacatttgaaacaaggaatacagacttttattgagctgctttctcattgcatcttctgtatttttgaagagcccggcagccaaaaaatgaataatatggcggggtcttatattttgagaacgcagaaccccgcataacgcgtcataatcctcaccttttgcaaagttcattgtaaaacgaccgttccggcaatcttcgaaacgctcgccggaagtcacgtaaatgaaaggcgcctcataaccttcaagctgtttcttcattacggtatacatgctgtcgtcttcgcaaaaaaataaaattggctctttcgtatgcgggaattttttactgcctttaaattcatatctatcccataccatttcatatagatgggttttccccaagctcttaattaattccagcccttcttcaggcgtcaggctgcattctttcacctttttcacgatttgctcaatttgcatcgttttttcattcatggaaaagcaactcctctatcagctctgacgtctctttcgtattcatctcacctgtttgtgctttttcaagaagcgacatgatttctccatctgctgtatctttatttgagttgtgaagctcagtgttcgagaaagcctcagctttctgcgcttcatctttatttaaatgaatccaatgtctgttcttgctgaaaggatagagaggaagagacagtttaaccggtttgagttcctcctcatacaagtcttcccagctgatttcacaaccgatcgtccacaactgagccagtttggccggcttgttttgctgaatcagtgattgaacatatgcatgaccttcggggccgtcgaataaaggagcgtacagactatcaaaatccgttacatttccttcataaacaccttgcagcctgctcccctgaatgtaaccgtttaatttttcaagaagatctccggtattcgagcaagtgatcgcaaggcggcattcaaatggttcccttccggtttgcagcgtatatgctatttcttcaagaccgattccggacttttctctaaaattgacgttatgcggtttatcagctgatcgattccggatgctgctgatatagcggcacagctcgctcagtgtctttaattcctgaaatatgtcaagtgatatttctgtgccgtacatttggtttataaaagagattaattcggaataagccaacggatcaaatccgaattccgaaagaggtgtctttgcatctatatctgcggtatctaaacgcaggatacccgctgccgctgcccgaaccgcctcttgcaaatcacgttcctgcacctcttgctgaccgaattgaactgatagttcttcatgtaaaaacgttgttaactctttggctttaaccatcagcctttcctttgttttggccgatagaacaatgatttgttcccgctcgccagttactgctttatcttgtccgtattcaaattcttccacgatgacatgagcatttgccccgccgaatccaaaggaactgactccggcacggcgcggaatttcatttccttttcgatcttttaatctggcccacttcatagttttattgacaatatgaaacggtgttccgcttaattgaatgtaagggttcagttccttgacatgaagtgtggcaggcagtgttttatacttcatggatagtaatactttaatcagccccggcattccagaggcgggctctaaatgaccgatattcgtttttactgaaccgatgccgcaatattggtcatgattctttcctggatgcggctcaaaagatccaaacgcttttttcaagccttcaatctcaatcggatctcccagttctgtcccggttccgtgtgcttcaatgtaagatatcgtatcgacaggaatatcggcatttttgtaaacagacgttaacagttctgcctgagcttccgggttcggagcggtcaatgaagcagatcttcctccatgattttctccggttcctctcaggaccccgtaaatattgtctctgtcattcattgccgcttgcaatggtttcaataacagaacagctgcaccttcaccgcggacataaccgtcggcaagtttatcaaacgtcttacaccggccgtccctagacaaaataccgagtttatcagtatacatatgcgtgactggatctaaaagcagcgaaaccccgcctgctaccgccagctcactttcaccattttgaatcgagcgcacagctctgtggattgctacaagactgcttgagcaggctgtatcaatggactcactcggacctctgaaattaaaatagtgggatacacgattgctgatgagtgcctggctgtttccggttcccgcaaacgcatgcgccccgtccgaatgcctcatcagcagctggcggtaatcattaaattgaatgcccgtaaacaccccgatatttttgccagacagctttgaagctttgtaacccgcatcttctatcgctttccaggtttcctgcaaataaattctgtgctgaggatccatgagttctgcttcccgcggattaatattgaaaaacgcctcatcgaatttatcggcatctgtgataaagccgccccatttcgaatgtacttcgctgtttcctttgccttcggcgtattttttccaatcccagcgatccgggggaatttcctgaatcaaatctttttcattgattaaattgatccaaaactcatctgcattttttgatcccggaaaaacacaactcatcccgataatggcaaccggctgcttctctggatgatggtcagcctgtcttgttgtctttttttcaaacggaaaacttcgcggcggcttcacggttttcccggtggttttcccagcgtgcactactttccttttttcagaaatgtttttttctgcatctgtattcccttttgcaacagtacgcagttcactgtttagaaattctgaaagagacttaatatggctgtaagtaaagaaaacggcaggtgtcagcttaagcttgtattttttattcagtcggacagctaatgttttcaaactgatagaatcaaagccgagattgccgaaattctctgccgtatccagctgttcaatgttaattttcaataattccgacaccatttgcttcagttcttccaggacattgtctgtataagccggtgctgtataagaaatttcctcttgacgaaccggaagcgtatttactttttgatgcggcagatcttttcttgctggtgtcgtttcggcatccccggtaacaaccgaaatttgcgggcagtcacttgccaaaatcgtctcaaaagccgctatcccttcttccgtttccaaataatcaaacccggatgcggaaagatatgcttcttcagcttctttgtttaaatgcattccgcctttacgccacaacggccagttaatcgaaatgctcttgccttgtctctcttgccggcggctctgttcggatctccaatttatatattgatcttgaaaataattgcccaacgcatagttaacctgtccaaaatctccgaagaccgaagaaatagaagaaaatacgataaagaaatcaagcggctcatctttcgttaattcatctaaacataccgtgccttcaattttagcagtcatgccatctgaaaaatcatccagattcatctctgtaaataaccgatcatcggcatgaccagctgaatgaataacgccttgaatggagccccaagtccgtttcgtttcttctatgacccgtcccatcgtcttttgatctgcggcatcagcttgataatataccgcatctcctccaagcgcctgcagccggtcaatgttatggcgtttatcagcagttaacggtgaccttcccgtcaatactaattttgcttgatactgagaagctaaatattttgcgaaaatcaggcccagaccgcccaaaccgcccgttatgaggtaaatcccttcctgtttcagctgatgagagtgctctgtatgattgaatacatagtcctttaatgtcttaacatacctcttgtcattaatatatttaacttcttccgcctgccattccacgcctgaaaccatttcgttaagacaaaattcagccattttttcaattgatatacgttttgaaaaaccgattgacttcacattctctgcggatggcaccaacatattcgccgtttttaaacagcctgcaagagcgcccgtatacggatcattcacgccttctttaaaagagtgaacaagaagcagagaatgaagataaagagaggcgtcactgcgagcgctcagggcttttaataaataaaaaattgattccaggccgctgagaaggcggtcacccgcgtaaaatgtttctcccgtgtgcaagatgacatcaggagaaaacccctttttctctaattcttcgaataaacgaatgtaatctgacgtcacttccgggtttacacagaatgtcagcagattttgatcggtctgccgctgatccggcgtgacgagaatgacacggctgtctgattgatttttcagagctccagccaatgcttcatcttttgcaaagaccagaattgtttttggctccctatctttgatttcaatcagaggttttttttgatcccacttatgctcataaaaacgcacatttttattaggcttttcgccaaaaaccagcccgctcagttccatcaaaatcccgccggcattgtctaatacatacacatcataagccgaatcgctttctccagtttgttctgcatatacataaacgggttcagtctcatgatcaaaaatcgtacattctttaatgttttccgggagctctccggcattttcccccgcaaggtatatgacggcttgatatacgctctcaatcacttccggtttgattatgcaccctttcggcgcggcctttgcttttatttttaaaagcacctgtccgttcctgctgacgcattgctctgccgctttcagactgtcactgcagctgtatccgaattcggcaagccgctgataaaacgcttcgtacggtatgcggtttgcgcgctgagacagaatcggctcaagatgaacatttccgttttcgtacgccccgccttctaattcgagccgccctgaggaataaatggatgagtcgctctgtttttctatagaatacgatgcaccctgattatccggggttaatacaatccggatctgctcattgcttccgctttgtaacatcggttctctaaaggagagctctgttaatttaataatcggattccctgaagccatcgctccggcagctctcgccatttcaatctggctgagaaacggaaacatttccttgtcttgatactttgtttttatatacaaatcggtatcgcttacattgataagaaacttctgggctttaaaatcagatatattgcatgaaatgtaaggatgcagatcgttattaacattcatccggcggctgcccatattttgcacatctattctgcatagctctttggcaaatggatatccgggtgctgatacccgtctcagagtggcatctttataaagtgacggccactctatcccgttaccgccaacccagtattcagcaatcttcacaagatccctgtttgcggctgcttcttcaatttcaactttattcatcctttgagcttctgttgtgtcttcgccgcttgtaaaaatatgatccgtcgcgtttccgagaatatagtctgtcagtcttttaagcaattcatctcttgtggaggcgataacagccaatctgtgcggcatttcttctctgccggtttgtaaagtaaatgctgtatttctaagtgtttctaatggataatctctggctgctatatgttcttttgcgcgttttgcatattctgccagcctgtcggcattttttgcagaaaaaacaaataaaagctgttcaggttcttcagccgcgagaggagagatagcttcatccgcaaattcttctaaaataacatgggcattagctcctcctgccccgaaagaactgattccggcacgcctgggaacggatgactcccatttttcggcactgtccggtacataaaaaggtgttttttgaaacggtatattttcattcaattcagcagaatgagtcagtgacggaacaatcgttttatgtttcatttgaagaataactttcgtaatgcccgctatgcctgcagcagcctcaagatgtccgatatttgatttaatcgatccgatcgcgcatgttttcttatcgcgttcggcatctgaaaatgctctggtcagaccggtgatttcaatcggatctcctaaggcggtgcctgttccgtgagcttctatatagctgatgctttttggatcaataaatcctttttttaaggctctcgtaatgacctcactttgagctttgggattcggcacggtatacccattcgtcttagcaccgtggttgatggctgttgccttaataactgaataaatctgatcaccgtccgcaatagccttttttacaggtttcagcagcacggcacctgtcccttctcccggcacatagccgtctcctccggaaccgaagcttctgcaccggccatcactggataaaaatccgccttgagtcaggagttcatatttatgaggatgaatggataaattgacgcctcctgcaattgcaatttcacattcattcctgattaaactttcacaggcaaaatgaacagccgttaatgatgaggaacacatcgtgtccaaagcaatacttggtccgctgaaattaaagaagtacgatacccggttggcgattgatgcatatgaggaagaaacggccgcttcgtgaccaacgctgtacagctgatagtggccgtacataacccctgcaaaaacaccgacgttttttcgttcaagcgttttctttgcgtaccccgcatcttctatggtgtgccaaaccgtctctaaaaacagtctctcctgcggatcaattaattcagcttcggcaggagaaatattaaagaacaacggatcaaaatgatacacatcgtcaataaatcccccccatttgctttggttttttacttcatcgcccgctgcgggctgatagtgcaaccccgaatcccaccgatcctcaggtatctcagttatacagtctttaccgttcaataagttttcccacagagtatcaagatcatttgccatcgggtaacgtccgctgataccgataatcgcgatatcattgtcatgatacttctcctgctgcaactgatttttcatctggattttctgtttcccgttaacttcggctgtctgttcatgatcttttttcttctgagatggggtgctgctcccgttttctcctaaccggagtttatgaagaagagtatccctgtgctcctcaacgaaatactgtgacaattctgccgcagtctgatattcgaataacagcgtttttgagagcgcgccgaaatgtttttcaagctcattcgtcatattgataatcataacggaatcaagtccgtatttttccaatgcctcttctgcatctattttgtccgcaggcatcctgaattctgcagcaatcacttttatgatgaaatcagatgtttcagctttcagtttctctgaatcaaatgattcgatatttctccctgttccttcatctgcctgaatattgtcttttcgttcatataattgctgaacatgattgtcaatttgctcatctccgtaaaatacagtaaattgcgaaaaaccggaggacaatgcgactgcaaacgcttctttaccttcctctttttctaaaggataaaaacccgcctttttcattgtctctaccgtgcgctcatccacttgcatgccgacttctttccacagcggccagttcagagagagagaaatcgtatcagaatcctgggcagaacgcatattcatgaaatgatccatataactgtttccgaacgcgtaatcagattgcccgacatttcccaacactgcggaagtagaggagaagcaaatgaaaaagtcaggattttctttctcaacagcatcattcagccacatcgtacccaatactttcggtctgattacctgatcgaattcctctcgtgacttgttaagaaggaaagagtcacggatgattcccgcgccctgaatgaccccgtttacttttccataagaagttttggctgttttgactacatattcggcttcttccttattggtaatatcagcctgaacataaacagctgacgaaccggcatcctctaatcgtctcagctgttttcttatatgatctgaaagcggagatctccccgttaaaacaaggcagcattttgtttgaaaagccaaatattccgcaaaggtaaatcctaatccgcccgcgcctcctgcgataatatatactccattttctctcagcggcacatctccgcttcgggaatttttttcgggttcatacgttttgagctgtttgacataacgctgcatgtctttataacgaatctctacatctgaaggctggaaatcactcagctcattgcgtatgatatcagctgcgtgaacagctgatattgactgctccatctcaatgctttttgctgagattaacggattttccagctgcaatgtccgcaaaaatccgcttgccgccgcgtaaagaggctgttctccagaaagatgtgaaaaatatccatataacagtttgatcggtttgcggcagttatttttgaagagcgcctgttgtaataaaaacaaagaatagactccgctgtcgcattgttcacgaatcgctctctctgtcttttcaaacggcatgtctgaccacaaatgcaccgcttcccgtatatctgacttctcttcttctataagccatcctaacaggtttatgtaatctctttcagagcgggggtcgatttcaaatacaccgtccccggtttttcgaaactctttccccggcttaaccaaaataacccttgtatcatgcaatgcagcaagttctttactcacatcttcatttttatcaaataataaaaggctgccctcacgccggccgccttttacatgaatgctgagatctgtccgctgccagaccgtctgataatatatcgcctgtccgttaccccctgcggaatgagaaccaagctgctgtatccgctttactccttcttccaaagaaatgatgccgctttctatgtcagaaagtactttttttctaatatgacgggcttctatcataaaaatcttcatcccctttacaaatggcactgccgcaaatgataaactaatcctgcatacgctccagcgcataatctgcttcctccgcagtcagttcgcccgcttttaattgtctgaggagctcttttactctctcgttctttccattggaatccgctgttgcacgagtctgtgcctccccagaaaacgtttcttttttacgaatggttacatccttcaaacctgcaagtctttctccttgttcattaagcagctgaatatcgtaaataagctcggattgacctttttgtcctgttttacgcgcataagcccagcattctgctgaaacttttttccgtatcgtaatctctcctattgaaaaaggaacataaacagatgcctcttctcttccgtccgtaatgccgaacaaagattgcagagccccatcaattaaagacggatgcaatatataatgttcaagagcatattcgacttcttttggcagcactaagtgtgcaaccgcttctgttttcccgccccataaacattgaatcggctgaaaagcgcgcccatacaggaacccgttctcccgaaaatactcgtaacattcatcttgttcacggacaaaagcacttctgtttatcatctcttgtctgtcgatgttctctatatcatcatcactgtaatgatgatcataatctaattcccccgtcacaaatccagtccttacagcagcatcctcgtcaggtgacatgttaaataatatgctgccgtcttttacggaaatgtgagtgtaaatggttaggctctcttgcaaaagcatggccggtctggcaaatatcacgttttttaaacgagtgacctttttctttcgatatgaccgcgttcccgctgcgcatgccatttcaagaaaagcagctgccgggagaatgctcttgttttttacgatgtggtcttttaaccaaatctcttttcctcttaatgtcgttttaaaaaactgctgttccagagtagattcattcgaatccagaagcgggtgcagtgaagactgccgcggcaatatttccgtaaatgttgcactttggtttcgaggcacccagtaagactcctcagcaaatggatataaaggaagcttgaccttttgcggggtatattcttcatataactctctccattgaatatcagccccgaaagaccataattttgcaagaagattcaagtcctttgtctccatcatcacctcgaggaatttatctttcctcttttgatcatgaaagataaagactttatcaaaatctttcgtaacattccctttgtatacgccctctccaattgttccttcagtacagaaagttctcagcttctccttaagttccggcaaatcgtaagctacaacagcaagtctgtcttccatcggttccctgcatgtctgcaatgtaaaagcgatatcagctgccgagacctttgtctcccgctctgtgaattgcagaaggcgccgggcgtattctttcagtctgtcttcatttttagcagagagaactgcggcaaacggaccgcttattgtttgtgtgtccgcatggttttgatattcttccacaatgacatgggcatttgctccgcccgctccgaacgaactgattgctgctctcctgcgggaggcgcctgattctttccgccactcttcttctttctgctgaacgtaaaaaggcgtcttttcaaatcggatattttggttcagctgttccgagtgaatggatggcgccaatttctgatgcttaaattgtaaaagaacttttgtaagggctgctatacctgcggcagactccaaatgtccgatgttagacttcactgagcctatggcacaaaattgtttatcgtccgtaaatttctcaaacgcttttgtcaatcctgcaatctcaatcggatctccgagcgaggtacccgttccgtgtgcttccaagtagctgacggatcgcggactgatgcccgatttcttaaaattttcagcaatcagctcagcttgtgcattcggattcggaaccgtaaatccattggtttttccgccatgatttacagatgttcctttaatcactccgtatatatggtcctgatcagcaattgctttttccaaaggtttcaaaagaacggcgcccgaaccttctcccgggacatagccgtctccgccctctccgaaacttctgcacaatccttcggtggaaacaaaattaccttgactcagccaaaggtatttgctgggatgtatggacacattaacgccgcccgcaagcgcaatttcactttcccctcttttaatgctctcacatgccaagtgaatggccgtcagcgatgatgaacacatcgtatccagtgcaatgctcggaccggagagattaaaaaagtatgaaaccctgttcgcaatagatgaaaagaaggaactgagcgcaatcggattgccccgcgcagtttcttctgcgccgaataattgatattgtccgtacatggctccgacaaacacaccggctttcataccgtcaagcttctcttttgtatatccagaatcttcaaacgtatgccaggaggtttcgagaaaaattcgctcctgagggtccatcagctcagcttctttatgagaaatgtggaaaaacagcggatcgaattgatcaacaccgctgataaaaccgccccacttactgttgatttttcccttctccattttgtcaggactgtaattcgatctgaaatcccaacgttcctcggggatttcaataatacagtttttccctccggcaatgttttcccagaactcctcaagagtatccgaattcggatatcttccgctcacaccgataatggcaatatcctcacccggctgaaccttgctcggtgcagatgcaaccctctgctgccggtgctgttttttactcagattttctcttttcttcggcactcttgttaccggagctgcccctgcggccttaagcactttttctttaaaagatgttaggaagaagtttgaaagctcttcaatgttctgatattcaaaaaagattgttttgggaagatccccgaaagtatcttcaagctttgaaataagtgacatgatcataagtgaattgattccgaatttctcaaaagagtctttcgcatttattttatgagcttggattttcaagacaccgctgatgatcttgattaaatagtcatttactttttctttcgcagcatgttcctcttcttcatcgtgttccgccgtgagtgtatcttgatctgctgcagctgtatttctttgaatcgaaagcgcttttatcattttatcccgctttccttctgcaggcattaagctggtaaatgaagaccgcagcattttcagaaacgcttccaaaacagaggaagttcgcatcggagtcattccgtatttttcttttatttggttgattccattgctgtcgagactcatcccgccatctttcaataacggccaattgattgaaagggtttttccgtttcgggagagctgagatcgaagcactgcaaaactgtccataaaatgatttgcgtacgcatagtcactttggccggcatttccgtaagcggaaaaagaagaaaagagaacaaaaaaatcaagatcttcgtcttttgtcagctcatccagccagattgtcccgtaaactttcgatttcagtacgtccgtaaaatcactgagacttttatttacaagaaatgagtcacgaaggatgccggcagcatgaatgatcccgtttatgctgccgtaccgctgtttaacgccgaaaatgaatcgctctgcctctgttcgatctgtgatgtccgtccgctgatattcaacaatagagccgctctcattaagcttactgatccgttctttttgatcagcggttaaaaaagaacggcctgtaagtataatcacggcttggttttctttagcgatgtgttccgcaaacagcagcccgagttttcccgctcctccggtaatgatatatatgccgcctttttgatacgttacagatccgttatcgtgttcaggaatatcaatatgctgcagctctttcacataacgggtatatgagtctattaaaatctcacattcatccgtttgaaagcgctgtatttcactgattgcagcatcccacatctcggaaaccggagaatttttgtcagaatcctcatggcgtatctgtatggttttcgctttaagcttagagctttccatgtttaccgttttcatgaaccctccgacagcttcatgaaacggctggttcagaccccttgtccaataaatatgcaataatgtaacaggttcgtttctccgcattaaagcttttgataataaaaagagcgagttgatccctctgcgaagagtttcattaacagactcttcagtgaattctctgatttctccgttccataaataaagcacgacatcaggtgtaaatccgttttcagccaaatcagacagcagcatttcgacatgattttcatcagaaggattgattgtgcatctattccgttcaattctataatcagaatcgggcgttacgagaatgacacggttatgatctccattcatcatctcggcatgctgaaaaagacggttatcctgatcaaaaatcagcatattccccggtgcctgctgattcggcatatcaatgttgtttgttcttacccaatcgttcttaaagaaaatggttggggacggagcttgtgattccggctccgcctttttttccatttgttcttttctgtaagtgcgaattagctccagtcctgcatcaggagacatttgctgttcttcaattaaggaaagtatttgtttgatctgcactattttccctccagcagctgataaacttggtcagcagaaagttcaccgtttttcaattgttctaataagaagagaatttcctgatcttcatttttacgtcctgcggttaattctcccccggtcacttttctgacagaaaagtctttcatgctcacggctatttcgccgctctcgttaataaaatcaatgttatacgtataaaaaccggtttctctcaccgagacatggcatcgggcagtaagcgccctcttaatgtgaagctctctaagtgaatatggaacaaataagccgtctttctcattatctcttaacaaaaatgccgccgcttgaaaaccgccgtcaattaatgaaggatgaagtgtaaaatgtgaaattccgttcgctaaatgagccggaagctccaattctgccattaactccctatcaccgcgatatacggctttcaacgtttgaaaactgctatgatatgtcaggcccatacgactgaagcggtgataacactcttcccggcttatgacagccttactgctgcgtttgaacttatcaatatcgacatactcagcattgctgtttatgtccccgaatactgtttcactttgtgtgcagatttgctgcacgccatccggaccctctttacatatcgttacgttcaacttatcttgtttcatttccaagtcggtataaatgtgcagcgtttttcctttatataatataggtctgttccacatcacgtcttttattttatatactttactttctccgcttatttccgcacaaacaagagccatttcaagcgaagcggctcccggcagcacatagtctcctgaaacaagatgatcagtgacgaaaaattcagttccggaaataacagttttaaatgcttgtttctttagtgttgagacattctcgctgattaatgggtgaagacttttgctattaacctcgcttttgttctttttcggggtgaaccaataactctcttttgcaaacggataagttggcagcggcactctattcaatttcttattgccgattgtcttccattcaaactcggctccattggcccaccattgtgcgagcagctcctcttttccgctatgaagagcctcctcaatcatatattcagaaacagctgtgggctctacagtgttttcgcttataaatacgcctttttgcaccctgctgtcatcaagaaagctgacgtatttatctctcagctcagtcagactcgctgcacatacggcaattctttcgttcattgcttcccggccgttttgcaatgtaaattccatgtcactggcattaacggtcatctcaccggcaatcacgcgatccaagtactgaaccatatgccggatatactcaagtaattgatctttgtttttcgcagataaaacaaaaatatgtgtgttaccgttgttttccggcacttctttttgaggttccctatattcctctaaaacaatatgcgcgttcacaccgccgaatccgaatgagctgacacccgctctcctcggcagatcgttgttctctttatcttttatcggattccacttttgagcggtttctgtgatataaaatggcgtattttccagtttgatgtatggattgagttctgaaaaatgggcgagtcccggaagtttgcgatatttaaatgccagtaacactttcatcactccggctattccggcagcggtttcgagatggccgatgtttgttttcacagacccgattccgcagcatttctgtttcgcaaaaggaatgtcccattctagatataacgttttaaatgcctttatgatgctgtttacttcaatcggatcgccaagacttgtccctgtgccatgcgcttctatatatcccgcagtggcagggctgacccccgccttccgccaagcttcggttaataagtccgcctgtgcgttcggattcggagcagtcaaagaattggcgcggccgccgtgatttacagctgaccctttaatcaaaccatatatatgatcaccgtctgcctgtgctttgctgagcggcttaagcaatactgcagccgccccttcactccttacatagccgtcagcgcttttatcgaacgttttgcactttccgtctttggaaagcatacctgctttatcaaaagctataaacagagtagggcttgtcataatatgcactccgcctgcaatcgccatttcaaaatcgcctctttgaatcccctcagccgcacgatggagtgcaactaacgaacttgaacaggcagtgtcaatcggttcgctcggacccgtcaggttcagctggtaagaaatacgatttgccaatatacaatgatttaaaccggttgcggtctgcgcctgaacagagacgccattttcattcagacgttcagcataatccgttgtggcgacccctgcaaacaccgcggttttcgtccctgccaaatcagacggcttatagcccgcatcttctattgttttccatacagtctccataaaaattctttgctggggatccattaattctgcttcggcgggagaaatcccgaaaaacaacggatcaaaactgtccgcgcctttgataaatccgcctttttttatttttgttctattgacgtccctgatcggatcgccgtcaaactctttccagtcccaacggtcttcaggaatgtctgtaatcatatcccgccctttttcaattccttcccaaaagtcttccagcgtatctgtttgggggaaacggccgcttattcccactattgcaaccggttcattcatatgtctttcctcttggctggttttgttttcaggctcaagggaatgttcataggtttccggcggaggcgtgctgtacaatgttttttcgtcagctgcagaaaaagattctgtctcagcaaaaagaatttctccgtattgctcgattacataatcagttatttcagccagtgaattgcattcaaagaaaatggacggcaataattccgtaccatattgttgattgatttcatttccgagtctggtaaacgtaatcgaatcaaatccgtactcgccgaatgaagtctcttcttctatttcctttctgtcaatcttcaaaatacttgacatcatctttgcgatgccctcaatcagattttctctccggtctttcgccgcagattcatctgaagaaaaagaaccgcagagatgaagctcctcggaatactcactctttaaaaactcaagaagttcattaaaatcagtaagaccgaaaaaatctgacggcatcattgatattcctaaagtttcgtttaattcgttgcccagcattgtaaacataattgaatcaaatccgtattcacttatcggcagttcaaaatcaaattcccgttcttcaatttttaatacgccggtgatgatgcgcgtcaaagtgctttttaaagattcagttattgacagctctttcggttcgtgattttcgtcggcgattgccggatcactttttccgctgtcaatcgttatcattcgttccagctttaattcattaccgctaaataccattatttgatgttcacaccctgtcattgcttgatcaaatgctgcaaggccttcccgttttcccagaggcagcattccgaaacggtcataaaggaacttctctgaatgaatatcaatttgcataccgccttctttccataaaggccaattaatcgagactgtttttccgggtttattttccgccgctctcatttccgcaaaataatccataaaccggtttgcataagcataatcagtttgtccggcattcccgattattgcgctgatagatgaaaacataacaaaaaagtccagaggttcactgtctgtataccggtcaagccatatcgttccgtaaaccttgctggccaagactgaattgagatcctcttcacgcttattgatgagtaatgaatcttttatcacaccggcgctgtgaataattcctttaacaggacctaatttgtttttgacgagttttatcaggttattgacattttccttatcagaaatatcggttcttacataaaaaacctctgatccgtttttttcgagctcttttacattgcttacggcttcctcagaaagctctgacctgccgataaggacaagttttattctcccttttcgcacaagatgtctggcgaaaatcagtcccagaccgcctgttcctcctgtaatgaggtaaactcccccttcttttacttccatcttttcggggggctcggcactttcaatttctgcagagtgctttacctgcctgattccatctctgtatctgatttctgaagtttcatcgctgatgattgtttctttcacaaggttttttaattcaggcagaccggcgttcagctgtaactgaatttcgtcgctgtgtatttcaatatttttaccggacaacataggatgttctaaatgaagcgacctaaaaaagccgctgattgccatttgataaggtaagatttgattttcccttgtgaaaaatacatgtgatatcaggattttatgtcttgggattgttgctaacagagctttcgttacattgaaaaccggcaaaacagcctcttccagcttttcacgaatgttatgctcaattcccgtttcagggctcatcccgattaaaatgacgcggtcaattgtcacttgtctttctttaagaatcgccagcaatttctgatagccgtcaagtttgacgctgttcaattcaaaggaatcagcttctttttcttgaaaactgccgccatggcggacaaagatcatattcaggccgatatctttatatgcctggcggatcagcggttctgatatatcccgacggagtgaaatcacaaggcagctgtttaaaccgctggcttcaggctgatgaagcagaggggcccgcttccacatatctgtataatacttaactgaatgccgctcatcctgagtctgcggtgcagcccttaatgccttcaacgctaagttttttattttaagacttacagatccgttttcatccataaatagtatatgaaaccttttgacatcatcatgttgtctttcatcggcagctgtaatgtaagcatagccgtttgccgaaggtgcgtgaagaatctccagctcacctaattcaaaaggcaaatatgcggtgtgatcgtcttgctgaccggacgtaaaccctgttgtggattgaaaaatgccatccaataaacacggttccagcagcgtgccggattttttatgaatgctctcaggaagtgatattcgtgcaagaacagcattttcatggataaacagctgttttattacctgaaaactggttccatagtccaaaccgctctgccggaaatccctataacactcagcgccgctgattaatcttttctgtccggttaaccagctgtccaattgaaaacgctctgtttgagaggcatcttgatctccgcatgtgataatgtttccttggcagtgaactgccgcttcaggttgcatatcggttttcaccacaaatctgccgtctttttgattcggcagcagatctatcattatcgtcttttctttttcaacggttatcggaaccgcccatacaacctgactcagttttatgactgattttccgtacagcctctctcccgcttctctggccgcttcgatgattgccgctccgggcagaaccgctttcccatgcacaacatggtcttttacataatattcagaatcagaaagcattttataaaatcggcactcacctgctgaaaaatcaaataaaggagctgtaccggctgctgatgttgtttgcgccttatttgacacccacagtctgttttttaagaaagggtaagtcggcagggcaatttttctcggttttctgccggtgcggaaatcttcccagcttaaattgcctcctgatacccaaaattcagccatttcggttaatgtggtgctgccggatttgagcggaagatccgattgctgctgtccgcgtttatgattcggttttttccctctaaatatttcgtgatcatcaattccattataaaagtgatttaatttcaacattagatcatcgatattatttgaaatgacagcaagcctttccggcatggcttcacgcccttcgagaagggtatacgcaatatcagaaaggtgaagcggcttgtttgttcccgcttgctgtaaaaactcgccctgcttatgacgggccttttgaagatattcctccagctgttttgctgattcccgtaaactcagtgaatgcttggctgagagtacgataagttcctcactttcctcacgcctcgtatgacagtcagcagcagactcatactcttccacaaggatatgagcatttgccccgcccgctccgaaagaacttaatcccgcgcgccgcggatatttgctgtcagaatgtttttcattcgcgggttttatccagtcggcggtttcctgctggaggcaaaaaggtgtctcttccagataaagatccggatgcacccgttcagcatgcagtgttgcggctatttttttatacttcatttgtaagataatctttgtcaggccggcaatacccgcggccgcttccaggtggccgatgttagatttaatcgatccgagagagcaatatgaaacatcttcggtataagctctaaacgccttggtcaggcctcggacttcaatcgggtcacccagcggcgttcccgtgccgtgggcttcaataaagctgacacttctggcgctccaaccggccgctttaagagctccttgaattaaatccgcctgtgcggcaggattaggcaccgtatagccatttgtctttccgccatgattaattgccgttcctttaatgactgcgtacacagtatctttatcacgtatggcatctttaagcggtttaagaataacggcccctacaccttccccgggcacgaaaccgtcgccgccttctccaaaacttctgcattttcccgattttgaaagcattcccatctgacatcggtataaatagtcagaaggatgaagatacaaatttactcctcccgcaaccgcaaccgagcactcaccctttgttaaactttggcaagccatgtgaattgccgttaaggatgaagaacaagccgtatctacagggacactgggacctgtaaagtcaaatgtgtaagacactctgttcgcgagagaccatgggaacgaatttggaagtacatcgtttttgtccgtaggtattctttcgccgagcagcttgtaagaattggtcgtcactcccgcaaatacaccgacatgtttttcggtctgctttctcaacccttcaatggtatatcccgaatcttcaaatgctttccacacggtttcgagaaatattcgttcctgaggatccatcgcttctgcttctctcggcgatatttggaaaaacaaagaatcaaatgattcagcattctttaaaaatccgccccatttgcaataaattttcccctcatgcgctttagcggggtctggatcatagtaggtctcataattccatcgttctttcggaatttctgtgattgcggttctctcttttgatagaagctcccacaattcttcgatattttcagccccgggataacggccgctgataccgattaccgctatcccgtcaagatgttctttttcctccgccgcaggtgcagtgatgttttgttccggcctggcgggggtaatgctctgaatctgttttcctttttcctcccgtgaaaataaacgccccagccgatccggatattcctttacaagatgatctgctaaatctctgattgtatgaaattcaaataaaagcgttttcgaaattgctcccagtgactgctccagctttgtgttgcattgatgaatcataaccgaatccattccatattcagccagatgcacatcttgatcgatctcttcccgttctgcaccgacctcagaggagatgatattggttaaaaacaaaactgtttgatccaaaatatcgccttgagccaaaggaatggcactgcctgtctctgtttcatccgtcaaaaatctctgccgcataaattgttcaaagcgctcatgatcaccgcagactgcaatattatgcagctgacccgaagttacaatccgcgaaaaccattgcgttccgtcttcagcaggaagttcttcgagcccggaaccatgaaaaagagacgtccgcccttgacctgacaggttcgcccccattccgatgtcttgccataaaggccaattgattgtcagcgtgcggccgctgcgcagagaattttgccgtttctgttcccgatattcggcaaaatgatctaaaaagccgtttgcatatgcataatcacactggccttcgttccctgcaatagagacgactgaagaaaaaacggcgaaaaaatctaattccagcgacttcgttgcatgatcaagattcaatgcaccatgaactttcggagcaatcacctctgaaagttcctgctttgtttttcgaaaaagcagcgagtctctgataactcctgcacaatgaatgatgccatgaagacctgcatgctgatcggtaataccgtcaatcattttttttaccgcttctttatcggatatattcgcctgtatataataaacctttgctttaaagctgttcaggtattctaaatgtttctgcttatcttcgtttaaaacagatcgccccgataggataatggtggatctttcagttttcgcgcaatattcagcgactttactgccaatccccccgaatccccctgtaattaaatacactttatctttttcagggtattgaatggtctttctgtttgtttctctctgcttcactaacatccgtgcatatcttacgcagcctctgtaagtgatatgaatatgccgatcaggcgctgtgtttatttctttataaagaatgtcagccttctctgaaaatgaaacggatgcagaatcatgttcaaagcaaaccgtcttacaatgcagctgcgggtattcttgttttaccgatttcaaaaaaccgttcacaccttcaaaatacggcaatttttctttttgatctgcgctgaatgtataaatgaacgttactttgtttataaggttctcgctgattaaagccttagtcagataaaacacggaataaattcctgattcgagtgtgtcttccagttcaggctgtttttcagaccacgtatgcaaaattgcatcgggcgctgcgcctttttcctttaacagacgaatgacaccttgataatcttcgggacgctgcctgttgatcgtgaaaacactgtcgcttatctgctctaaacggtcactgggcataataagatatgcggacgtattctctctttttttcagctcttcaaaatagtctttattcccggagaacaacaaaatagtacaagcttgtccgctgcccgcttcattctcaagtgcggtttctttccataccggcgtataaagtgcctgattcttcttttctgaaaaagccgtgtctgattttaccggctgagggtttaaagaaaattgagagcgctcaaacggataaggcggaagcggtgcttttcttttatgatcatcacctagtttcgcccattcaatctcttctcctgaaagccacatttgcataaatgaatgatatagagcctcatcggctggtttgtccgcttcaaaagcagccgctttgtttagttttgctgatggaggtagcgatccgaattgaaaaactgaaaaatcagaaatattcacatccggctccgttcccttttcttccgtgtgaagcggcatatggtcagctatctcctgagacacggcatccatttgattgtattctgtcatcaacggaaaacgagttttatcataaaaacctgccggctgctcattaatacaagcaacagcctgtttaattccgtcttgctttttcaataacatgctcagaaaaagttctttagacaagattccttcatccagtaaatttaatatttccagaacataatcatcattaaagaatccatcataatctgttaaatcccatctcttatacagtcttctcatagaggcaaggatagccatgatcgccgcttcctcatcagccggcaatgcatttcttttatccgccgtgcgattcacaatataagataaaatctcgatttcctgagtctttcccgctttatcccactcttctaaaaaccctttaaacgtatattgatgctcaagaagcagccgtgttttcccgtacaggcggtctgcaaaatcagccgggaagctcagaccgttcagcagcatccttacataatcttcatttaatcgaaccggcgggtacgtttttgaagtgtacggattgacaaatggaatggacggcggcttacaggatatgtgcgaaggtttttcagcgcctgtgatgacagaaatggccttttcaattttgatgatatccgctgctgcaagagcgacgtaatatccgtctccggcgcctgtaataaggcttggcttaaaaccggatgccaggatactttttatgatttccgtattgataactaaagaatacaagcggattttctcaggtgtccattttcttttaaatgaactgtgcaatgttggtatacccttcagcaccggccttacgttcttttctaaatcagggaacacccgtttcaaagcggcaaattgtttataactttcccatttgaagtcaccgatggcaagcgcccattcagaatcttgtttcctccgaaaacttaatccctctttaagctgatttttaaattcctccttgctgcctgccaataaaccagccctgtaatcaaacgatgtccttgttaaaagggtgctgctgatcacttcatttgatattttgcaaaattcctcagaatcgtcagcaaaggttctccaatgatgtatcatttgtttcatgctttcttcacttttagcggaaaaaaggaagggtacccttccttttctgtcagattcgtcttttgtatgtataaattcttcgatgatgacgtgagagttgacacccccaaaaccgaaggagctgattcccgccctgagcggagccccgtctgccgccttccaatcacttgaatcaagcgccggcctaaacggtgttttttcaaactgtataattgggtttaccgtatgtacattcaggcttttcggcaccctccggtgtttcatcatcattagaacttttatcaatccggccattcccgccgctgcttctgtatgaccgatatttgttttcacacttccgatcctgcaatattgagtattctcagtatattgccgatacgcttttgtcaatgcttctatttctatcggatcgcccagagatgtacctgtgccatgtgcttctacataagaaaccgtcgcagcatcgacagcagcgttgtgtaaagcttctgagatgacccggcactgcgcttctgctctgggagcggttatggaacgggttttaccgccatgattaacagctgtcccttttatgatcccgtatatatggtgaccggcttttactgcatcaccaaggcgctgcagcaatacaacgcctgccccttctccgggaacgtacccgttcgccgctgcgtcaaaggttttacatttgccgtcaggactcagcattctggctttagaaaaagaaatatattttccgggttggaaattcaagtttactcccgatgcgattgcataatcgctttcttttgtccgcaatgacttaaccgcttcatgtaaagcaacaagcgatgatgcacaagcggcatttacagacatgctttttccggtcaaaccgaatgtgtatgaaagccggttggaaagcatagcttcgaaacttcctaaacaggcataactgtcgatttccgattcagcatgacctgtctgccggtagtcagaattcataatacccgcaaaaacagaagtggttttacactggagatcctgcaaagaaacccctgaatcttcgatgcaccgccaagtttcttctaaaaggattctttgctcaggatccatgtttttcgcttcccggggagagatattaaaaaacttatgatcgaaatggtcagctttatgaataaaacctccccacttgctgattgttttgttcggtatactgatatcagctgaataataaagatcgggatcccaccgttcaatcggcacttcccggatggaatctttgccgctatttatgttttcccagaattcatgataatgatctgcatcggggaatctgcaagcaaccccgattatcgcgatatccgcattctgtttattcaaatgaaccattggcctccacccgctccttctttagtgtagaaataacgtatccaatctgcgccttagcagactttcggtctcattcatcaatttttcaccaatgtcatcgacatgtctgtttctccatgattccaaatccgtgccctttacccaatgattaaaagcgcctaaagacgggccgcaatgaacttggaaattcaccttttgttcttcctgcccttccaaagcaagcagacatcctctctgcaaataccacttaaatagtaacagcatcttatatttttgattgcgctcagctttttgggccaggttcggctgtttttctaatatgctttcgtagatttcatcaaaagtcttgttaaaataatcattttcgagctgaatctttgtcttttcatctatctcactcaacgactcatattgttggtagatttgaaataatttatttgccctgaccgaaaacagcgtgccctttttcagcacctgaacctttgttccgaactcaaacagagtctccgaaggcgcataagcagtatcgcatattcctgtctcactcagcatttctttaacaaaaccgcttgtttcggcttcaactgtacattgattaatggatcccgtcataataaaatcagcgcccattaaaaaagcagacgcggcagactcgggagtcccgattcctcccgcagccccgatccttatcttccttgcgtatttgtgtgtttccatcatttcatcccgcaggttaacaaaaaacggcagcatcgccgtcaatgagccctgttcagtattacttccgcaatctgcttcaataatgatatcgtctgctgccggaatacggctgagccactccgcctgctcttccgtcagcataccgtgctgacacattctctttacgatacttggaggaggcggactcagaaatgcggccgcaacttccggccgtgaaactttggcaatgatccgattatgaggtatgaccctgccgcttttgtctatcttcaactgatgcgctttgtaataaattaatggtgcgctgacagaaagatacgaagacgcttctattactcgtacgtcatgcttgatatataaatctatcaattccttttctctatcttgatgatccggctcaaatcgcagattcattccgtagggctggccatttttgagtgtcttcttaatagaaataagggcctgttcaatttcccttataggtaaacccgctgtgccaaagaaccccagcattcctttcttcccgaggcggatcagcatttcagcggaagaaatccccctattcatcgcacctgccaaatacgcgtatgtcaaaccgtaatcttctttgaaagattgatcacccaatcgggacaccggtgaagctgcaccgctctctatattttcggccaagaggctatgctctttcccgctttccgaattgtccttgttcccttcagaaaaaaagagactgtcttccggcgcactgatagtaagcggttcctcatctctttgtatggtttgaattaatttagtcagaatgtttccaggaccgatctcttcaaacagagtgacgccttgtcccattagatacctaatgctttcagtccattttaccgagtttgttatttgttcaattaaattccgtttgatatcttcttgtttataaggtcttgccgtatagttagaaatgaccgggaaattcaattcagaaaaatgaaactcctcgataaattccgcaaattcacgctgtgcactttccatgaaacgagaatgaaaagctccgccgacttgcaatacgatataagctttcgccccttctttttcaaaaaaagaggctgcccgctttatctcttctgcagcccctgctatcacaatttgtgaagatgtattgtaattggcgatatctatctggccgagttcatacttttgaagtattttttttatgtgatgctcatccagtccgatcacggcagccattccgccctcggaagcctcactcattaactcgcctcttttagcaaccagccggagacctgtttcaaaattaaaaacgccggccgcaaaaagcgcagtatattcacccagactatgtcctgcaacagcatcagggcgtgtatgaccttcttttaaaccctttaaatattgcagtgcgctcactgtataaattgcaggctgtgtatacttcgtatcagtcagcctttctttttcatctgaaaggcataaatcctttatggagtatcctaaaatatgatctgcctttttaatgagctcactgaattcatcgaataagtctctgcccattcctttaaactgcgctccctgtccgggaaagacgtaagcaagcatttgttttcctcctgttccgtatttctgccgtttcttttcgttccgattttgattaacgtttttcacttcaattttaaaattgtcgtttactctcagcacccttacttaataagcattactaagaaaaataaaaaaacctttatgccggataaaggtttaaaagcaaaaagcatgtacaaatatcatatcgccgtaaatataaatagatagaattttctgataattaaaatcgcattttcatcctgttttatatatatatcaatataataaaaacattccaacgtgccgaaacaacgattggttttatgtgaatatttccctaaataaatactataccatgatttacttgttgtcaatgggaaacacacgtatataccaattcttcagccgcctttttacaggcggctgaactcggttgttatcagttcatcagcccatgccgatatgccttcactatactatttgcggaataatagttctttctctttgttgtagtctttagtaaattgattgaactcatctgcttgtttatgcaccttttcgtaaactgagtttactttgctgatttgctcttccagctgcgctaatgtgagctttttatctttaatcagtttataaaggtccttatcaagtgaaatggctttttcgtactttttgtacaaaagatcataagatgcataccttttctccattaaagcgacagcatgcccggctttttcttttactttcttatcctttatttcttgagaagttttttttgcggattcaaacgctttttttgaatcatcaatactgtctttttctgctttcagatgtttttttcgctgatttgcattgctcagagcctgatcagacagtgtgacaattttctggtaatcatccatattcagtttaaccgcgctgtcgtatagcttatgctcttttttctccaatttttctaatgttttctgctctttttgaaacggtttttccgcttgaacggctttttccatcgagtcatgaagcgattcaaccggatcttttcccccgcagccggcaagaagcatacttgcggcgccgagcgctccgattcctgctaatacctttttttgaatcatattcacttaaaatcccccaatcttgacaatttccactatagaagcccgaacgctttttgacaatagctgagctgtaattggcatgaccgtgtaaagacgcttacggtgctttcaaagaatacttgcgtaaaaaattgagaaaacagggcggatgaccatacatctttttggcttttacatagtttatagtagacgccggccctgctgacagagggtcagcgtaattaaaagaggaggtttttttatgtacggatatggatttggcggcggatttggcggcggttgttgcggcggcggatatggttatggcggcggttacggttacggctgcggcggcggatacggccgcacattcgcattaatcgtcgtattgtttatcttattaatcatcgtcggtgccgcttatttaggctgcggctgctgacattatacaccatgacatcggccggcctgctatggccggccaattgtttcattgcgccgcgataaagaaattcgctataatttacatattaagctttaggagtgaagtttcttgattactatggaaaatattgtacgagacggacatcccgtgctcagagagatcgctgaagaggtacagcttcccgcttctgacgaagaaaaacagcatcttgctgatatgattgagtttgtgaaaaacagccaaaatcctgaattagccgagaaatacaagcttcgtccgggcgtcggtcttgccgctccccaaacagacgtaaaaaaacggatgatcgccgtccatgcagaagatgcgaaaggcactttatacagctatgctctttttaaccctaagatcgtcagccactcagtggaaaaaagctacttgacgagcggagaaggctgcctgtcggtagacgaacccattcccggctatgtgccgcgctacgcccgcatccgcgtaaaggcggtgacgcttgaaggagaacagattgacatccgcctcaaaggttttccggccatcgtgtttcagcacgaaatcgatcatctgaacggcgtgatgttttacgaccatattgataaagaaaatccgttcaaagaacctgaaaacgccattgccattgaccgttaaaaataaccggcacttcccaaagtgccggttttctttatttcaaaaggcccagttctttgacggcccagctgattccttcctcatccaccggctttgtgacgaaatcggcggcagcttttaattccggaaccgcatttcccatcgccaccccggtgccgacaaaacggatcatctcaagatcatttagtccgtcgccgaatgcataagtgtcacttacgccgtacggaagccgctcaagcactcttttaatgccttccgcttttgaaccgcctttcggaagcacatccgttgacaattcatgccagcggacgtaatcaaactccggaaaagcggcatatgctttttcttcatgtccgcggcagaataaaagcagctgataaatttcttttcctttataaaaagtttcatcaacttcgggataaggcgctttcagactgccgattccttccgagacgtgcggatgtccggggacggtcgttttcatcgtgtcttccgccataaatacgacggggtgctccccttctgccgcctgctttaataaacgcgcaaccgcatcttcaggaagcggatttttataaatgacctcaccttcaaatacgacatactggccgttgtatgaaataaatgattcaatctcaagctcttccagaatcggttttaccataaacggggaccttccgctggcgataaaaacgtgatggccagcctctttaagcgccttcacggcgtttcttgcgctatagggaatatgtttatcatggtcatagatcgtgccgtcaatatcaaaaaagatcaattttggtttcatgtcaatttctcctttttcccgtttatcagtcgtgtctttttcaatatcatcatacagaaagtttttcttccggaaaaccgccttgatgaaattccagttttacccacgaaaacaaattcattttttccgcatactactgctataaagggctttaaaggaggtatacaatgctgcgccgattacggaagaaactcagaagacagtggggcggaatgctccgaaaaaaagtcatcgcgtagaagggatctttcggtttttgaaagtcccttttttgctcgagactttccttataatccgttttcgaatataatagaataagcgagtctaacatacggcatttaaggagagatttggatgatttataaggtattttatcaagagaaggctgacgaagtacctgttcgggaaaaaacagattcactttacattgagggcgtttcagaacgggacgtcagaacgaaactgaaagatcagaaatacaacattgaatttgttcagcctgtggacggtgcttttttagaatatgagaagcagagcgaaaattttaaagtattggagttatgagcggaatgaaatttgtaaaaaatgaccagactgccgttttcgccctcggcggattgggcgagatcgggaaaaatacgtacggggtgcagtttcaggatgaaattgtactgattgatgcgggaatcaagttcccggaagatgaacttctcggcattgattacgtaatccccgattacacgtatttagtaaaaaatgaagataaaattaaaggtctgtttatcacccacggtcacgaagaccatatcggcggtattccgtacctgctcagacaagtaaatattcccgtttacggcggtaaactcgcgatcggcttacttcggaataaacttgaagagcacgggctgttaagacagaccaaattaaacatcatcggtgaagacgacatcgtgaagttccgcaagacgtctgtatccttcttcagaacgacacacagcattccggattcatacggaatcgtcgtcaaaacaccgccgggcaatatcgtacataccggggactttaagttcgatttcacaccggtaggcgaaccggcaaacttgacaaagatggctgaaatcgggaaagaaggcgttctgtgcctgctttctgacagtacaaacagtgaggttcctgatttcaccatgtcagaacgccgcgtaggcgaaagcattcacgatattttccgaaaagtggacggcagaattatatttgcgacattcgcttcgaatatacaccgtcttcagcaggtgattgaagcagccgttttaaacggcagaaaagttgccgtattcggacgcagtatggaatcggctattgaaatcggacaaaatctcggttacattacctgtcctaaaaatacgtttattgagcataacgaaatcaatcgtttgcctgccaataaggtaacgattttatgtacgggaagccaaggtgaaccgatggcggcgttatcacgcatcgctaacgggacgcaccggcagatttccattaatcccggagatacggtcgtcttttcttcctctccgattcccggaaacacaatcagcgtaagccgcaccatcaaccagctgtaccgtgcgggcgcagaagtcattcacggttcattgaatgacattcatacatccggacacggcggacaggaagagcagaaattaatgctccgcctgatcaaaccgaagttctttatgccgattcacggtgagtacagaatgcagaaaatgcacgtcaaactcgcgactgattgcggcatacccgaagaaaactgctttatcatggataatggcgaagtgctggccctcaaaggcgaagaagccgctgtggcaggcaaaattccgtccggctccgtttacattgacggaagcggaatcggtgatatcggcaatatcgtgctccgcgaccgccgcattctttcagaagaaggccttgttatcgttgttgtcagcatcaatatggacgactttaaggtttcggcggggcctgatttaatctcaagaggttttgtatacatgagagaatccggtgatttgatcaatgacgcgcagcagctgatttcgaaccatctggagaaagtaatggatcggaaaacaacgcagtggtccgaaattaaaaacgaaattaccgatacacttgctccgttcctatacgaaaaaacaaaacgccgcccgatgatccttccgatcattatggaggtctaaaaaaaactgcactcgtaatgagtgcagtttttttattgcagcggaatatgctgaaaggctttgacatcaaacagaccggctgctgtcattttaatatccggaatcaccggaagcgctaaaaacgataatgtgagaaacggattgaaatcaccgttgaatccgagcagaggaagcttttcatgaagcacgcccaagctgtcattgacccattccgccgacttatcagacaaaagcccggcgatcggaagcggaacggagtgaagcaattctccgtttttcacggctgttaatcctcctccggtgtcacggagcctgttgattgcttttgccaaatcggcatcgtttgtaccgacggcgatgatattatgggaatcgtgagaaatggttgtggcgatggcgccttcttttaacccgaacccttgtacaatcccgagtcctatcattttttcgccgctgtgccgctctgcgacggcgatttttaataaatcattttctgtatcaggacgaaacgcgtcagcagacggtgcaggcacttctttttttctcgtctccaaatgattcggtatcatttcgattatattcattttcttaccctcttgaatcggtatatgaaaatccgattcagtcagcggcgctttcagccgcactgtatccaacagcgcctggtccggcgaataggaaccggcagactgttcataaaccgtgcgtccgttctcggcaacggtccggccggcgaccatggtcttcgtgacggcagcctcccgtacatctgaaataaacagcagatctgcgtcaaaacccggcgctaccgccccttttgtttcaagaccgtagcactcagccgcatttaaactggcgagttgatacgcaaggaatggatcaagtcccgcctttatcgccattttgacttggtggttcacacttccttctgaaagcagatcatctacatgcttatcatccgtgcaaaagaaaaagcgtcgcgcgtttttttcattcaccgccggcagcacattgagcgtattttttgccaccgatccttcgcgcagcatgacatacattccccgtctgattctgtccagcgcttcttcttttgtcgtcacttcatgatcatttgacaccattgcggttctgtatatattgatgatatctgaagacagtccggctaaatgcccgtcgatccgttttccgtgacgcttggcatcaagcagtttctgaagcatatcctcttcaccttccgcaacagatacataatccattacttccgcaagcccgagcacctctttctcctgataaaaaggctttaaatcctcggcttttaatacggctcctgagcgttcaaagctagcggcgggaacacaggaaggaagcatgaaacggatgttcagcggcgcctttttcgcctgctctatcataaaagaaatgccttttgctccggaaacgttcgcaatttcgtgaggatcagtaatgacagtagtcactccgtgtgggaggacggctttagcaaattcaatcggagtaaccatagaggactcgatatgaacatgtccgtcaataaaccccggaacgatcatttgaccttctgcatcaatgacttcttccccttcatattcgcccagcccgacgatcactccgcccgtaatggcgatatctgcagaaatccattcctggttaaatacatccatgatgtttccgtttttaatgacggtatcggctttttgtctgccggctgatgcattcagccgttcagccagtgtttctttgttcaaaatgaggcctcctctttttctttatatggtacaatatgctatcggatcgcctgatcatagtcaataaaaattgcagaaaataccgcttacacgataaatgtctttctattctgacataataaaagaccgtccttttacagacggcttttcactttgtgtgaagcactcttttttcaaatcgggaaatgtccgtaagagagccgataacgatgagaatatcttctttttggatcatttcagtcgccagcggagatacgatcacttctttttctctcttgatggccacgatattaatgccgtacttcgcccggatgtccagatcaagcagtgtgttgcctgcaagcctgctgttggccacgatctccacaatgctgtgttcgtcggacagctccaaataatcaagcacattatttgatacgatgttgtgggcgatgcgttttgccatgtcacgttcagggtggacgatgtggtcggccccgattttcgcaagcactttctcatgataatcgttctgcgctttaaccgtgatcgtattcacgccgagttcctttaagatcagcgtcgttaaaatgctcgcctgtatattttcgccgattgccacaatgacgtggtcaaagttgcgcagccctaagtttttcagcactgattcatcggttgaatcgccgatgaccgcgtgtgatgcgattttggcgtattcattaactttatcttcatcaatatccatcgccatgacctcaaggccttcttcacttaatgctttgcaaatacttccgccgaagcgtccgagaccgataacggcaaactcttttctcataacagtactcctttaaacaatatctctaataggaatagtatcacattttcggcaatgagttcatatagcgtttaagcttttctgaaaaggcgggcgataaatacaggtccgctccgcgttcgatttcttcctgatagtgacccggaggcgcaatttcctcagctttatcaagaacgagaaatgtcaggacgcctctgtatacacggccgccggcacacacttctatgaacgcgggacggtatgtgtggttatcaacaccttctcttttgtacagataggttgccgcttcaaacgggagcttgtacagcacgccttcagttcgtcccccgtcttcaacaagatcggctctggaaccgtcaggacgccttaatgtgaatctcgtcgaatacccttcaacaaccgcccctccgaccggctcggcaaaaaagtggtcgacccccgcctgtttaaaccgggcattgtccatacaggagccgtatgcgaaataataaaccggactgtcattctcccgtttcataaaacggtattctttccagtctccgcttttgatacggctgaatgaggcacactggtcgggctttacgacatatgcgaaggcggttttattcccggcatccgtcgtcacggcaacctcttttcgatcaaaatcagcataatacgcatccagcttacggatcatctgatgatctgtttcatacaattccccgtacacaaaagctgtttctgctaaagacgccgcaggctgacctttatccgtttcgtacagcacgccgtttatcgcagcctgctcgcacacacacggagcgcctttcagcagttcatggttttcttcacgcttccgtaacaaaccgtatacaaaaagaagcaagttatttttcctccttttggacagcagccgcttctaacggcagaatcacctgaaacgtactgccttctccatttttgctcttaatgttaagtttaccattatgctccttcagaattcgtaaacaaatcggaagcccgagacccgttccctgatcttttgttgagaaaaacggtttcccgatgttttcaagcttttctttcgacatgccgtttccttcatcctgtatgctgatcaccgcgtattcttcatcccgttttgtataaatatgaatattcccgccgtcaggcatcgcttcaatcgcatttttaataatattgataaatacctgtttcagctggttttcgtcaccgttgaccatacaggactcagtctgcctgaaatccttctcaatcacagtgttcgacagcaccgcgttcgtgtcaagaagcgtcgccacctgccgtaaaatatggttgagatgatgagcggtaaacgtcacggtctgcggcttggcgagcagaaggagctcccccagcacaaggtcaatccttttaatctccgaaaaaataatatcaaaataatccgttctttccggatactgggctttcatcagctggagaaagccgctgactgatgttaaaggatttcttacttcatgggcgattcctgccgcaagctccccggcaatggccagcttttgagattgcatggcaaggcgttcgttcgtttccagaagctcgtcgaccgcttttttccgttcactgatatcagacatcgtccccaggcttccgacaaatttctgtctgcggtcataatacagcttataatggacttctccccaaaagatcgagccgtctcttttaatatatttggccgtaaacattcctgacggggactgctgcttgatttgggagataatataatcaatgatatgtttttcttttataaaataatcattatacatcgtgcccatacattcgctgatggagtggcccgtaatcgccgtccaggcctgattcaaatatgtaatattcccttgagcatccgtctgaaaaacgatttcctgcagattgtccatgatccggtttttctcatctgaaagcgcctttgctttctgctcgctgtccttcagctccgccagcagctgctttttattatccacataataagccagcagccagacgctgattaatgtgacggcggtaaaggtgatgtcaacgggccagttaatcggattccgttcaatcatataaaataaataatcccaaaacataataaaaatcattgccaagattaaggaaatgatacgcgcttgatattttcccatagtcccacctgccgctagcatttctacatatattgtaacattgttgactgcattattgactaaaaaatgataactattcccaattaattgagcaggttcgcttacttttcccgtgagtttttgcacaagttcataataaaaggacggaatgatgctccgccctttttgctgattatgatctatcttttaacgcttcctcgatttcctcaagcagcattttcgctccttcaggacttaaaataattttgccgttgccgtactcctgattttcgggagtaatttcccccgtcattaagcaaatgccgtgcggcttgtattttttcaagacaattttgtctccgtcaacgaaaaattcaatactatctttaatagcgatatccaatgctcttctcaattcaatcggcatgacaatacgcccgagttcgtctacttttcttactacaccaattgatttcatagaaatcccctacttcctttaatgtctcttctttatgtccaaggaaaatccttcataaacgtagacgaaaggaacggagcaaaagtttctcagcatccggaactgaatgtttttttacaaaagaaaatccttttgaaatatgggatacagactttccctccttttttacaaaaacatttcattcccggcggaaacccccaaaaatcgtggtttttctcagaaactttaaatgtagaatcaattaaatcaggatagggattgggtgaaaacatgtttcaatcaactgagatcggaatcgacttaggaaccgctaatatacttgtttacagtaaaaataaaggaattattttaaacgagccttccgttgtcgctgtagatacaacaacgaaagcggtgcttgccatcggaacggatgccaaaagcatgatcggaaagacgccggggaaaatcgtcgccgttcggccgatgaaagacggtgtcattgctgattatgatatgacaactgacttattaaaacacattatgaaaaaagccggaaaaaaaatcggaatgactttccgcaaaccgaatgtcgtcgtctgcacgccttcaggctcaacagccgttgaacgacgcgccatcagtgacgctgtcaaaaactgcggagcgaaaaacgttcacttgattgaagaacccgtagccgctgcaatcggggccgacctccctgttgacgagccggtcgcaaacgtcgtcgtagatatcggcggcggtacgactgaagtcgccatcatctcattcgggggcgtcgtatcctgccattcgatcagaatcggcggcgaccagcttgatgaagatatcgcctcgttcgtcagaaaaaaatacaacctgctgatcggggaacgtacggcagaacaagtgaaaatggaaatcggatttgcattgatcgaacatgtgccggaaacgatggaaatccgcgggcgtgaccttgtaaccggtctgccgaagacaatcagactgcaatctaatgaaattcagcacgcgatgcgtgagtcgctcctgcatattcttgaagcgatcagagcgacacttgaagattgtccgccggagctcagcggtgatatcgttgaccgcggcgtcgtgttaaccggcggaggctcccttttaaacgggatgaaagaatggctgacagatgaaatcgtcgttcccgttcatttagcggcgaatccgcttgaatcagtggctatcggcacggggcgttcattagacgtcatcgataagctgcaaaaagcaattaaataataagattgtgcttcttttttctccggccggctcatattgtgagaactggagaaacattaaggaggaagcatatgcttagagatgtgggaagacgcgtagcagtagccgtcattttaagcggaattattttggggggtatgagcatatcactggccaatatgccccattctccggccggcggcgccgtaaaactgaatcacccgtaaagacgcagcaaaagctgtgtctttttcgtttgtgctcctttctttcctttatgaggcgatatttgatatgatgagaaaaaccgatgaggaggaatgaacgatgagttcgtttactgaaaagttacatacatatgctcagctggcggtagaagtcggcgtcaatgtccaaaaaggacagcatgtcgtaatcaatgcctcaactgatgtccgggaacttgtcagactgcttgccaaacattcttatgaaaaaggcgctaaaaacgtcaccgtaaattggcaggacgatgaactgtccagattaaaatacgagatggcaccttttgaagcgtttgaagagtatcctgaatgggaagcaaaaggaaaagaagagctcgcgaaaaaaggggctgcgtttatttctgtcgtctcatccgaccccgacctgttaaaaggcactgacggcaaacggattgcagcgttccaaaaagccgccggaaaagcattgcatacatacagacaatatattcaatcagataaggtcagctggacggtgatcggagcggcttcaacaggctgggcgaaaaaagtgttcccggatcagccggaagaaacagccgttcagcttttatgggaagaaattttcaaaacgacccgcgtaaatgaagaaaaccctgtggaagcatggaaaaaacatgatcaaaaccttcatgaaaaagtggaacacttaaacaaaaaacattacagcgccctgcattatcaggctgaaggaacagacttaaccattgaactgccgaaaaaacatgtatgggcaggcgcgggaagcgtgaatgagagcgggcacgaattcatggccaacatgccgacagaagaggttttcaccctcccgcagcgtgacggggtgaacggcacggtttccagcacgaaaccgctgagctacggcggcaacattattgataacttcactcttacctttgaaaacggccgcattgtcgatgtgaaagctgaaaaaggcgaggagattttaaaaggcatcgtcgaaaccgatgaaggctcacactatctcggtgaagtggccttagtgccgtacgattcaccgatttcacaatcaaatattctattttacaacacactgtacgatgaaaacgcctctaaccacttggcgatcggcagtgcgtatgcctttaatattgagggcggcaaacaaatgacacgggaagagcttgtcaaagagggcttaaatgaaagcattacacacgtagattttatggtcggttccaaagacatgaatatcgacggcattaccgcggacggcaaaagagaaccgatcttcagaaacggaaactgggcattttaataaaaaaaggaggcgatcaggcctcctttttttatttcgcttcatacatttgcaagttggcgcagacggtttccaaaacaggtgtatcaactgacaagcctttcgctttctcaagcaaaaatccgtgtaaatgatcaccttccgtcaccctgcccttttccatatctctcagcatcgacgatttcatatggaaagacatgcttgtcaatgtgcgataactctcttcttccagatcaggatctttcgggatgccggcagccttgaaaatggcgccgatttcagcaaagaggcgctttgccgtgttgcggccgccttctgtttctaaaatcggtccgaccggctgttgaaacagagtggtcactcccgcctgcgcggcaataaacatatattttttccaaatgtccttttcaatatcccggctgatgatgacatccgctttcacacctgcaaatgcgttttccagctcattcatacgttctgtgcgttccccgttccattcaccgaaaacaaagcggtgggcagcgctcgtatgaagaatgtcccctttgtcgttaagggcgctctcaataaagcagaggccgcccagcacctgccgttttgaaaaagcttcaaacagctggttatagtgcctgtatccgtttaaaaaaggaataatgaccgacgaaggtttgacaaacggtttgacatcccgaatgacgtcctgcaaagaatacgcttttgaagcgatgataaccacgtcaaatgctccttcttcgcccgccatgattaatttcggcttgattgaaacatcacctttttcacttttgacggtcaatcccgtctcttgtaattgttccgcccgtttcttgcggacgagaaacgtcacgtcatttcccttttctgcaagacgcgcgccgatatatccgcccactcctccagctccgacaactaaaaacttcatgatgcattcctccgtctcttttcaagttatgtattcatttattgtaacgggaagtcagaagattgaaaacttttttcataaataaaaaagcagagtctcccctgcttctttattacgcgtatagctcttcaagctttttctgtacatccgtgttttcaagaaattcgtcataagacatttgtttgtcaacaatgcctttaggcgttaattcaatgatgcggttggcaattgtctgtacaaactgatggtcatgagatgaaaacagcatagcgcctttaaagctgattaagccgttgttaagcgccgtaatggattccaaatctaagtggtttgtcggttcatccagaattaaaatattcgcgccggaaagcatcgcttttgaaagcatgcagcgcactttttctcctccggaaaggacgtttgattttttgttgacttcttctcctgagaacagcatgcgtcctaagaaaccgcgcagaaagctttcgctttggtcatgcggcgagtactggcggagccagtcaacaaggttcgcgtcgctgccgtcaaaatattcgctgttgtctttagggaagtacgcctgagaagtggtcacaccccatttaaatgtgccgctgtctgcttccatttccccggaaatgattttaaacaatgtcgtaacggcaagttcgtttcggcccgtaaaagcgattttatcttctctgttcataataaagctgacgttatcaagcaccttaaccccgtcaatcgtttttgttaagccttcaacccgcagcacgtcatttccgatctcacgttccggcgtgaaattgacataaggataacggcgtgatgacggtttgatatcatcaagcgtgattttatcaaggagtttctttcttgatgtcgcctgctttgatttagaggcgttggcgctgaatctggccacgaactcctgaagctgtttaatctgctcttcttttttcttgttggcttcctgagaaagctttaaagcaagctggctggattcataccagaaatcatagttgccgacgtacacttgaattttattaaaatcaagatcggcgatgtgcgtgcacactttatttaaaaagtgacggtcatgggatacgacgatgactgtgttctcaaagttgattaaaaactcttccagccactgaatcgctttcagatccaagtggttggtcggttcatcaagcagcagaacgtccggcttgccgaacagcgcctgtgccaaaagcactttcaccttttctgaaccgcctaagtcagccattttcttcgtatgcaggtcttcagagatgcccaggccctttaacaaaatagcggcttcactttcagcttcccatccatttaattccgcaaactctccttcaagctcagcggcgcggatgccgtcttcatctgaaaaatcaggcttcatataaatcgcgtctttttcctgcatgacttcgtataaacgtttatgtcccataatgacgactttcagcacttcgaagtcttcatattcaaagtggttctgcttcagaatggcaagacgttcgcccgggctcatatggacatcgccggtctgcggctccagctcaccggataaaattttcaaaaatgttgattttccggcaccgtttgcgcctattaatccgtagcagttgcccggcgtaaatttaatattgacatcttcaaataacttgcgatccgcaaaacgcaagctcacattatttacagcaatcatttagaatcctccatcgtgtctatcatcattaaaagtataccatgaataaaggggaagagaaatgtttccctgcgaatatacgggtttgaaaagatgcaggcaaacccggagcgctgtgatacaatagatatatatacatattcatcacggaggaacaagttgaagcttttaacactcacagaatattgtcttatgattttctttaccggggtttttctggccgtcacaggctttacggcacgtgacatcggcttgtacgtcggaatcgccctcatttatacgttttcgcatctcttttcaaaacggatgcttgaaaaacgcggcaaagagaagcagcaggtgaatctttttttcagcgttctggccattgtcggatcagtgctggccacggtaatgttcatcgccatcgccgcctcgtttgccaaataaaaaacgcctgctgtccaaatcgggcagcgcggcgtttttattttgtctgacgcatatcatgaaacgggaagaacacaaacttcgaggtgccgacgatccggttttcggcaattaaaccgagtccgttccggctgtccattgagttcagccgattgtcgcccatgacgaagtatttgcctttcggaacctttacggggccgaaatctcccgtcaggttgactcccagttttttcgcttcttttttattgctcgcgaggtacggttctgcgatttttttgccgtttatataaagcgtgtcatttttcatttccaccgtttctccaggttttccgatgagccgctttacataatggactttcgatgtatcgccgttaataatgacgatgtccccccgctcgatttctccgatataattgacgcttttgttgacaaacagcctttcaccgtcatgtaatgtcgggtacattgatgatccttccactaagtacggttcaaacaggaaatggcggattaacagcgcaagtgcgactgctatgatgatggcctttccccattcccaatatgtgttggattttctttttaccgatttttcagaagtaggtttttgttcttcagtcaacgtggttcctcctagacgatcactgtttcagttcatgtaccatctttactttatcataactcatcataaaatacataacgcttctatgcgtacatgattgaaaaaagcgcccgtaaaggacgctttttgtttatttctctgcaaccggttttttgacgattcccaagataaccgccgttacaatcgctccgatcacgatgctcattaagtacagcagcggatggttcgtaatgaatgcaacgaatattcctccgtgcggtgcaggaagcgttacccggaaaaactctgtcaacccgcccgctaccgcagaaccgacaacggctgcagggatgacgcgaagcggatcagccgctgcaaacgggatggcgccttctgtaacgaaagctgctcccatgaagtagcacgtaataccggcttcacggtcacgtttagagaatttgtgtttaaagaatgttgtcgccagtgcaattccaagcggcggagccattccgcccgccatgatggccgcatgcggcgcatagtttccggcatcgatcatcgcaattccgaaagtgaacgccgctttattgagcgggccgcccatgtcgatagccatcataccgcctaaaataatacccattaaaacaaggtttccagttccaaggctttcaagccaatttgttaagaaattcatgaacgctgcgacaggtgtgtttatgacaaattgcatcagaactcctgtgataaaaataccgagcagcggataaatcaatacaggttttaatccgtcaagagtctgaggaataaagacaaacagctttttcaaaaggactacgacataaccggctaagaatccggcaatcagtccgcccaagaatccggcattcgcctgcgtagccataaatccgccgaccatacccggcgcaaatcccggacggtccgcaatactcattgcaatgaatccggcaagaactgcaacgatcagttttaacgcattatcgccgccgataaagttcagcgctgcggcaaacgtgttgtatgtcgggtctttcggatcagctgaatgaattccccagaagaatgaaatcgcaacgagaattccgccgccgacgacaaatggcagcatgttgctgacaccgctcattaagtgtttatagaaagtacttccgatgcttgtgcctgatttctgtttcgggccgtcttcatttgaagcggaagatcctccgccgctgccctcgtaaatcggcgcatcttggttaacggctttttcaatcagttcctgaggacgtctgataccggccgttacaggcacttgaagaacatgtttgcctttaaagcgttccatttcaacctgtttatcagccgccacgataatcgcaggcgcgtcttcaatttcttgagccgtcagcttatgtttgataccgcttgagccgtttgtctcgactttaatgtcaacgccgagctctttcgctttttccttcagtgcgtcagctgccatgaacgtatgggcgatacctgtcggacatgccgtaacggcaaggattttgccctttcctgacggcgctgcctgttcttcctgctcttcttcttcctcatcgtcatctttgtcatgctgattgatgatgtcaatgatcgcatcttctgattcagcttcaagaagctgtttgcggatttcctcacgcatgagaagcgttgaaagtcttgataatgcctcaaggtgcgtattattcgctccttcggttgccgcaatcataaagaccaggtgtgccggctgaccgtctaatgattcataatccacaccatcttttgaacggccgaatgcgatggccgggttaatgacgctcgccgtcttcgcatgaggaatggcaatgccttcgccgattcccgtcgagctttggctttcacgatttaaaatggctgctttgtaagcctctctgtcatttaatctgccggctttgtcaagcactgtcaccatttcatcgataacgttttctttctctttgctttctatattgagatgaattgtatctcttgttaacagctcagttatcttcacttttctttcctcctctatagacgtgtgactttaacttcaggaagaagctgctgtacaaactcttcagttccgagttcttcagaaaatgccgtcgcgcttccggaagcaactcctaaacggaacgcatcttccaaaggcagctgttttgaaattcccgcaaggaatcccgcgacgacggaatcacccgcgcctaccgaattgacaagctttcctttaggaacattggcgaggaaaaccgcctctttcgtaaataaaagcgcaccgtcgccagccatcgaaacaatcgcatgttcagcgccttgttcaatcaattttttaccgtaaggaacggcagcttcggctgaatcaatgaccgtattgaacatttccccaagctcatgatgattcggcttcatcaaaaacggtttcatttctgtcgctttcatcagcgcttcaccggagatgtccaccactacccgggcattctgctttctgcatgcctcagcaattttttcatacgtattatgcggcagggaagaaggaatgcttcccgctaaaacgacgatgtctccctcttccagagcggagaactgttctaaaaaggcattgaacacttcgtctgaaatcgtcgggccctgtccgttaatttccgtttcatcgcccgttttcagttttacatttatacgcgtgtcttcatccacctcagaaaaagccgtttccagaccttcctgctgcaaaaatgacgtgatataatttccggtaaatccgccgacaaaccccaatgcttttgacggcacatggtgtcttttcagtaatctcgaaacgttgatgccttttccgccgggatacttcgtgtcatagctggaacggtttaaaccgcctacggcaaaatcttcaacgtgaacgatatagtcaacagacggattgagggttacagtgtaaatcatggtttcactacctttacgacagttttttcttggtaattatcgaatgcaagttcttcagcttcagtggtaatgatagcggcatcgcccaaggcggcgaacgctgcgaaagaaatctctccgaatttagaaggatcggctaaaacatacgcatttttcgcctgtctcacagcctttgtcttcagaagagcctcatccggatcgggtgttgtaaagccggcttcaatgtgcacgccgttcaccccgaggaagcttttgtcaaaacggtactggctgaccgcggttaatgaggcgccgccgatcatcgcacctgttctatgcttcacatatcctccgagaagataaaagggaatccctttccttattaaagcgtcgatatgcataactccgtttgtgacaaccacaatgtccttagatggatctataaaatcaatcatgtgcaatgtagttgttcccgcatcaagataaatacagtcaccttcttctaataaagatgccgcttcttctgcgatcttcagtttaccctgaaggtttttggaggatttttcaagcatatcgggttcttgcctgctgttggaaagtttagacgccccgccgtgaacgcgctttaaaaatccgcgctcttcgagtgttgataaatctcttctgatcgttgattcagaagcatttgtcatgcttatcagctcttgaatcttcaccacatcacgcttttcaatctgatcaataatcagctgatacctttcaggagtgagcatattccgcctcctttggaaacgtattcatttcggctgcaagataattgtaaacgctttttttacttctagcaactaaaatcactcaaattcattcaataactatcaaaatctttcacatttgttcatattaacgtatgtacatagggtttgtaaactgtaaattcgacaaaaagggggacaattgtatgacattttctttttatcataaatgaaaaaagtctattatattcatgcaatcattaaaacacaaaaaaaccccatgcagactgcatggggtgccggttattcataccgtaacgcttcaatcggatctaagcgagatgctttgttggcgggcagcatgccgaaaatgacaccgatcagcatactgaacagcacaccgatacaaaccacctgccaggaaacgagcgacggccagcctgcgataagggaaacgagtgatgctcccccgtagccgagacagattccgattaagccgccgattaatgtaagcacaacagattcaattaagaattgtgtcagaatctgtcctctcgtggcaccgagcgatttgcggatgccgatttctcttgtccgttccgtcactgatacgagcataatattcatgaccccgatcccgccgacaacgagagaaataccggcgatcgaaccgatgatcgtcgtcatgacggtcgtgacctggccgattcccgccgcgatttcttccatattcatgacttgataggcctcttttgtaccgtgattgtcatttaagagacgggccgcttcttttcctgttgatttgatttgatcagctgactccgtctgaacggaaacgttgctgtagtcgttagtaccgaaagacgttttcagcatgttgaacggcacatacatttcactgagtcctaacgataaaaagccgctctcttctttcagtacgccgattacttcaacgggctgtccgccggcccagacgatttttccgagcggagacgttttcccgaacagcttttcagccatttttttcgagatgattcctgctcttttcccggaaagaaaatcattatccgtaaatgtccgtccatcttgaacgtccagcttttttacgtccatgtagccgctgttaatgccgttcagcgtaatatccgtgtcttcttcatggtaacgggccgtcatggattttaccgcggaagcgacaacctgctttacgccgtccactccttttaatccattaatatcttcttctgtaaaactcgcttcctgtaaggcgttcggattggctgttaattcttcatcactgggcatgtaaaacaattcaatcgtattgcccggcccgctgatggattgcttcagcatttgctctccgccctggccgacagccacaacaacaattactgaaccgacgccgataatgattccgagcattgtcagaatcgatctcagcttgtgagctcttacggaactgagggccatccggagattttctaacaggctcattcccccactctcctctgctcagcatcgcgggaaacgatcatgccgtcacggacgaaaatcactctgtttgtacagtccgccacttcaggctcatgagtgacgagcaccacggtcacgccctctgcattaagctctgtgaactgctccataatggaaatgcttgttttcgtatccagtgcgccggtcggttcatcagctaaaatgagcttcggttcgttcacgatggctcttgcaatcgcgacacgctgcttctggccgcctgacagctcattcggcatgtgacgcatccgatccgccaaaccgactttttccagcgcatgctcagcccgttcctcacgctcttttttgccgataccggcgtagatcatggggagttcgacattttttcttgcattcaatcgcggcagcagctgaaactgctgaaagacaaatccgattgatttgttccggaccgccgcaagctctttttcagtgcatgaagaaacatcttcgcccgcaagcctgtaactgccggacgtcggtctatctagacagccgatgatattcatgatcgtagattttcccgatcccgacggtcccataattgacacatattctccttcttcaatcgtcaagtcgattgaacggagaacatcaaacgtctccttgccgatctgatagctttttttcacctttgaaagctgaatcatctatgctttcacatccgttccgtcagtcaaaccgtcagccggattcagaatgactttatcatcctttgaaagcccctcttttatctccgtaagctgatttgcggtatcgccgactttaactttcacgcgtttggccttcccgtcttttaccgtaaagacccagtgctcatctccgtcttttttgactgcggaggacggcagcgtatcggctttccgtttgtcggtttcaatgttcataattaatttaaatcccggtttgccttccggaaggtttccgatcagcttaacctgaaacggatactggacggcttgttccgtgctttcccccgaagcagcgcttgacttttgatcaggaacgaggccgacagccgccactctccctttccacgttttacctggaatggcgtctgaggtaatcgtaacgctttgtccctttttcactttcagcgtgtcgtattcggacaaattgccggcaacgatcaggtgttccgggtctcctatatgtataaccggttcttgaatatccgattttttagaagccgcttcttgatttaccgagattaccgtcccgtccatctcactcttaacattgagattcgccacctgattttcaagagactgcttttgcaaatcagattgctttaattcgatttccgccgttttttgctgaagctgcagatcagtccgttcggattcaatttgttttttggcttccgcttctcccacttgttttgccagatcttgttccttgctgtttaatgctctgagtttttcttcaacttgttcgatttgcatccgttttgattgttctgtcaactcattttgttctttatcaagattgagctgctcatttgtatatgtgactaacgacgaccctttttttactttgtcgccttcttttactttcactttatcaagagttcctttatccgcttcataaaaaacatactgttctttagagaatttaagtgttcccggaaccataaccgtagaggagatttctctgttttccatggttccggtttcgatttttttcccggcgctgccgcccgcgggagcggcagacttataaatattgataccgatgaatactgcaacaattacggcgatgccgattccgatccaaatttttttcatgttatacacctgctgtcactgaacttaacagtcctccgactgccgaaactaaaagcataataacaaacaggacaatcgcggaagtccaggccgcttttttcgaaatgccgcctgtatagcgaagtcccaaagcgagcagaatatagctccagatgctgaaaatgtcgaacgcgcttaaaaagaccgcgacgccgtctccggccggtatgacactcgccaaagatgtaacggcatacaatgagcccgcaccggtaaaataagtgacaagaccgttaataactaagccgatattggtaataaatgccgtaaacaggctgagtgagagcatttttttgtaagttgtcacgccgcctgaaattttgacgcacagccagtaaatgagcggaacgataaacagagcgataatgcccccgaagattcctccgaacatcgagccgaatttagcgaaggttttggtcatttcaatctgatcatccgtcaaaccgtcaagagatgagctgttcagcacttcttcataattcatcccaagcccgcgcaaaatactgccggccgcgataagaatgatgacaatcaggagaggaatgccgatgaccggcttttcttttaatcttttaaactgcacaacaggacttgtaatgacgccgaaaattgacggcttttccgttactgccgtattgcttttttccaggtttggttccatattgctgatgcctcctatgtattattctgtttatacgtacgctttaggctgagagaagtttcaatttttttgccgtttgcgtatttatgctaaattgtaacacaaattctcagctttacgttccataattatgtaaaaaaaagcattgtcagatccgtgcgacgggatgctcaaagccttgtgaaggcactgtcttcagcctattcatgcagtcaaaaccagctcaatcacaaatccctttaaatccctttaaatcccatttaaatattctctggaattcagcgcctatatacaaaaaagccggatggcaatgatgcacatccggctcttttttcaccctccgcttacaggagggataaaggcaatggtatcaccttctgttacgatgctgttgtcttttacatatgtttcattgattgcgatcatggcattgtcaatcgtctgaagtccgtaccgttcctttaacagtgtttttacagcagacgccgccgcctctttttcgtcaagttcaatgaccggtgttcccgcctgctccgcaagcccggcaaacaataatactttaatcatcgcgattcccctttatgcaaatccggttttccgttcggatagggcgttgtttccagctgatcgcctatccattcttcgccgtcttcccagatttcttttttccatatcggcacaatctgttttatccgttcaattgcatattcattcgcctcatatgccgcctttctgtgcggtgaagacacggcgattacgaccgctgcttctccgatatcaaggacgccgacacggtgagtgattgcagcttcggctccttcccatttcgcgctgatttcatcgccgatttgagaaagcatttgaacagccatcggttcatacgcttcatattcgagacgcaccgtccgccgtccggcagtccactctctgaccgtgccgataaacgttgtgatggcgccggcttcacgcttttcaactttttttacgatattttccgcaatgataggttcccttgtaatttgaaaacgttccatttatgcagattcccctttcagctgcgaaagcacaaacatcatggcagccggatcgtccgcatggaatacgggcatgcctgcatctgccggcatatactccgtatttctgctgataaccgcgatcacgcgctccaaatgcttcagcttttgccaatcttcgctgtctttgatcataatgattttcggatgcggcgcatgtttaaatccctctatgagaagaccgtcaattcccagacattcatacagactgatcaaacccgccagatcccatttttttcgcgccgtaagctgcaggacgccgtccccttctactgccgtaaccgcggctccggcttttgaaaaacgctccgagtcttttccgtcagaaaaaggttccggttctccgccatgtccatgatgttttaaacatccaatatcgcactctttcggcgccgctttcagcacacgttcaataaacgttgttttaccgctgttttgaaaacctacgatctggacgatcgggaaagaattgaccacggccattcacttccattctcatcacggatgaggagcacgtgaaccgtccggcccgcttcatatcccctcgttcctcccggcagaaggataaacgcgtttgcttcggctagagatgtgactgagcttgatttgtcgagaccgaccggtgacgccatcatctttccgtccttatgataaacaaatgccctcacaaatctcgtaaacggattcggtttcggaaagtcgtttgttaacacggcttccgcccatccggaatgaggtttttcattcagaagccacgtctgaatcatcggtttgacaaacagggtgaatccgacataacatgcggacggattgcctgaaaggccgaacagcagcatgtcatcggcccgggcgacagttgtcacgctccccgggcgcattgccactttgttaaaaagaacttccgctccgagcttattataaatgtctggaagaaaatcaaaatcgccgactgacacgccgccggtcgtgatcagaaaatcaacttttttcatagcttccttcaccgcatcatagctgtcatcaaaatcatcggaaattttccctaagttcagcggcaccgcgcccgcttcaatgacctgggcatacaccatcgcagcgttgctgttgcggattttccccggctcaagcggatcgctgacatgaagaagctcggtccccgttgctataatgccgacaaccggctttctgaccacgggaacggaagcatagccgaaggttgctaaaagagcggttacgcccggcgtgattttcgtccctttttttaatagcgagctgccctttttcgcatcttctccttgatatgaaatattatcgcccgcatggaaagggcgtttcactgacatgtaattcgtcccgttttcagaaaacgtttttgtcagctcaagcatcactacggcatccgcgccttttggaatctgcgcccccgtcataatgcggaccgcttcataagggccgagttttttttccgatacggcgccggctccgatatggtcaatgacttcaaaggtgacggcattgtcacgggaagccgtttttgaatcgctcgccctgatggcaaacccgtcatacggggaacggttaaaggccggcacatcatgatccgccttaacatcctccgccaaatagcggtggagactgtcctcaagcgccacccattcggtatccccctgttttttataccggctcacccggcggactgcttcgtccacctgaatcggcgttcttttttcaagcatagcaatatctccccttcctacagtccgatcaccctggccagaactgaatttgcttcttttatatcgtttgtaccgtgaatcaaagcccgtccgtcctgaaaaataacgattctgaagcgctcatacgccatgtgcagcagaaattcatttgcttccactttaccgatctgcttcagacgtttgacaagctcttctttatccagcctctttaaggcttccgatctgatttgaacggtgtctctcccgcacagcacgcttgctttcggcctgttttcaggctgcagatacggatatacgggctccgcgccgcaggaagggcaatgatcccgtttgatctgatccacatttatgctcatattggtgttattccacacgtcaaacgtgaaaaagcgccgatttaccgccgcatgatttcctgtcagcaatttcagcgcctcagcctgctgataagcagagacgatatgaaccgccggaggtatgatacctgctgtatcacatgtcgctccgcccacgggcatttgctcaaacaggcaggataaacacggcgtaacccccggaataatcgtcatgcacattccctgactgctgacacaggccccgtaaatccaaggtgttttcgttttcagcgccagatcattgatgaccattctcgtttcaaaattatctgtcgcatccacgatgcaatccgcttgttcgatcagcggttcgagcgtttccgccgtaccttccgccgcgtaagcatcgatatgtatatcactgtttaccgccaaaagacgcgccttggccgccattgctttcggcaggcgctgtctcgcgtcttcttctgtatacagctgctgtctttgtaaattgctccattccacataatcccggtcaataatcgccatacggcccgctccggctcttgccaaaccctctgccgcggctgttccgagagctccggctccgacaatcaggacactgctgtcagccagcgcctgctgccctttttcccctatcggcttaaatcttgtctgccgcgaatagcgctcttccatctgtgttgtccccttgcatttttatttccatcataccatgtttcttcccgatcagtcttgatttgaagactcgacatgcgccaaaagtctggtgtaatcgtcccgtgtgttgatattagcgaactcctccggcccggcgccgatgtcttcagcctgcacataacagacagacagccgtttcagcgtgtctgtcattttcagtttgttttgtgtcagctgatcaaaaagcacatcctgcacccgtttatggtaaaccgccaagaggggctgctctctgtttttacaaaccggtatgacagcgtccagatttcccgtcagcttcatttcaagcgcagccatcgtttttcttgtcacgagcggcgtgtcacaggatatgaccgtatatgtttcgccttccgtttgtttcattgccgtatatatgccggcaagcgggcccattccccgaaaccgcggctcatcggccaaaacatgccgctctctgtttgataagaacttttttatatgctcagggcggctgataattaccgtttctccgccgccgaaggcttttttcgcctgttcataaaacatgccgcccttccactttgcaaaagctttcggttctccgaatcttcgggaagctccccccgctaatattacattcacccgtttcatgtcatctctctcccattctatataaaagcatagcaaacgcctcagccgaaatacaatattacggtgcttgtctgtttaattaagaggaatagccgttgatcctttcccatattgtagtgttaacatcatgagggagatggttcttatgaaaatatccggtccgtttttccacgacacttctcaagagaacctttacttgaaatccgaactttccagatgcagaaaattaatttcagaatttgaagcaagctacttccatcagaaaaataataagcttcaggaggaaaacgccaatattaaagagcggcttcacaagctttctgacgaattggaagccatggctcaaaaacacaaacagacaagtgacacggaacgttctttgcatgaaatcagagccgggctgctcgataaaatcgtcattctgcaagaactgcttcagcaggaaacgtttcggcggaaaaatgagatggaagaaaagcaccgtctgcatcttacaaatgtaaaatttgaagaagaaaataaaaacttacatacccgcatccgctcacttgagaccgccattcaaactgaacggacttctcacgaagatatgaaacagcgttatcatgccgctgcagacgaaaatacccggctccaaacacaaatgatagaaaaagaataccagcttaaacatattaaaatagaaattaatcatatgagagatcgaatactagaaacaaaagaacggcttgtagaaatagaaaaaacgaaagaaaagttatttcaagaaaccattctttcgtataaacggcagctggacgaaagtgatgcttggattgccggccattttgctgatattgacagccgcacggcggaaccggcggaacaagctctggaaatcccttctgtttccaaagagactgttcaggcagaagacttgcttaaagccgttaccgaacaagtcatctccctgcaaaaacaatttgtacaatcagagtcccgcgatcagtcgtttgatgaaaaactggatgcgttgaaagaacgtgctgacggcgaaaagcctttccagaaatatgtcgtcaagcttgaaaaaaagcctggaaaagaggcgtcacttccgcagaataagcgggaaagcgcaaaaaaactgcttgagtaacgcaagcagtttttactgttttattcagcagccgtatcatttgccgtttctgctgtttcctgagaaatttctccctcaagaatatattggccgcggtatggttttttcacttccggatacattttaattaagctttgcataaatgttgtcatattaggaatttcaaggccgctttccttttcaatttccttttgcagttcggaacttttaatcgctgcattgtggcgtttcaatgttttaatcgctgcttcgcgcagttttgccgcttttgatcccggtctcgccgtccctcttcttcttcttgtagaaccgtctggaatgccggcgggaagagacgtaatagactgcatctgcggctgggaggattgaggctgtgcctgcggcttttgatagcttctcatttcctgtgctgcaagctctgcaagcaccgggagagagtcactttttttctccggacgaaactctttttttgtatcggacaggctgcctgtattgtctaattctctcagttttgcatatattttatcacgttctatttgatattcacgaatgacttttacctctgcttcgttcaattgttctaaacgtaagcgcagcgcttctctttcattaaacatgtgtaaaaccccctgtcaaaaatttaaacgcttttattaagatattagattacaaaagtaattttatcaactattattttatcattttactattttatttactctatgaaaaattgcttattttctgaaaatggtactttatatacaaaaatcccttatcatataggggattctggacaaagttccaatttattcaaccatttcaaaatataccttgaaattacttgtttaatgaaaattagcgtgatatctacaattttcgactataatatgtaaaagataatgatatcgataaaacaagcggtacagcgtgtttacggctgtttctcttattttttaagccgcacatgtcatattggaattttttatccaataggcacaaaaaaaccctgttacctaaacggcaaagggtttgcagaaccgagacaatagtccgacggagattgtcccgattactcagaagcctgctccgtttctgaaagtactcggctgacgcgtttttcaagcattttcatcccgcttcctcccgcttgaaaatggcggagctgtccggttttatcgaaaaggtaataagccggcacatattcattttcaaatgcttcagtcagcgtatgatcgctgtcgacgtaaatcggctgagagatatcgtgtgcagttgctgtttccttgattttctcaaggtcaagatcgtcttcggaacggggcatgtgaacggccaccacattcagctgatctttatatttatcacgaaattcgttcatctcaggcatcgcttctttacacatgcggcagctggcggaccagaagtgaatcagtgccggctttccgccgaccagctgttccttcgtgacttctctgttaatccatgctttagcgcctgtcaattcaggcatttgctgacgtaatttcatcttatttccctccttatgaaaaaggttttttgccggggctttcagttccgccgggcaacgttctcctgttttccctccaaaggatatgatttggctgaatcaccatgttaaaatgagtgtggcgattccttagttcatatcttcacaaaaatgatgatattgaaaccgggcaatatgaacaaatcataaatgaaataactggtttctattaaaaggtttatcttattttaaaaacgggtatatcacttttagctttttccgcaaaagacttgaaaggaagacatcactatgattgatttaaaacactttgactgggccgggcttctcacatctgccgggattttcatcataaagctggctctcattattttagcgtactttattttccgggcggcaggaaaaaagctgatcaagcatctgtttcagaaattcgagcaacaaaacaacctctccacaggccgcgcttatactttgcgaagcctcgcgcttaatgtatatggatacatcttgattttcgtttttatcgtaatgattttggatttatttcactacaatccgagcgctctcattgccggcgccggcgtggtcggtctcgcagtcggcttcggggctcaggggcttgtcagtgacatcgtcaccggattttttatccttttggaaaaacagatcgacgtcggcgattatattacggttgccggttacagcggcattgtcgagcaggtcggtctccgtacgacgcaaatccggagctttgacggcacgcttcactatcttcccaaccggggcattacgaatgtgagcaaccattcccgcggaacgatgcaggcgcttgtcgatattaaagtgccgcttgaaaaaaatcttgatgaaaccattcaaatcctgcaaaccgcgtgtgacaaagcagccgctgagctcccgcagattaaggaagggccggacgtcatcggggttcaggatttaagctcgtcagaaatggtgatcagaatcattgccaaaacagaaaatatggagcaatggcgggttgaacgcgtactgcggagagaaatgaaaatcgcgctcgaccgttttaaaaacgccgcttccgccgaatagaaaaaccgaagcgtaagcttcggttttttctttttaatgaaattttttttccacttcgctgcagatttcgtcggcggtcattccggaagccgtaatgacgggagcctgagttgacgtatcggcaattccttggacattgctgtcaagtccggttacaacacagcagtcacaattcttcgcatcctcaggagtcttcatcatcactacgtcatatcctttttgttttaacgcctgttctacatccgataaagattgttcaattccaatttttttcgtcatattgaacacctccgttatgtagaatgctcaatttttgttagattattcttcttttcggatttaattggcatacttcgaaaaatatccgaccatgacatttaccgcggtttccatcgcatcttcatccgggttcagcttggcgtgatgaagcccgtgggatgaatcggcccccagccagaacataaagccgggatattttttcagcatatatccgaaatcttctccggtcatcgcttctttcgccgttctcacgtcagcaagctgatgatcgctgacaaattgcataaattcttcggtcaggccgcttgtattataaacttgatgataaacggacggatacgtgacttttcctttgcatcggaagccgatttcaattcctttgacaagctcttcaatccgctttttcaccatacgcattgattcctcggaaagcgtccggatggttccctccagatgagcatgctctgcgatgatattttgcgccgtgcccccggtaatcgttccgacagttatcacagcgctgtcaagcggatccgtatttctggatatgaccgtctgcagctgcgtgacaagcgtgctcgcggcgacgaccatgtcgtctgctgtatgcggatatgccgcatgcccgcctttcccctcaagatcgatgacaagctcgctcgtattggcaaacagcaatccgcttttggtggaaattgtgcctacaggaagctcaggtgctatatggagagcggtaatcaaatccggcgtccattttttcagcacatcgctttcaagcatcggttccgctccgcccggtccttcttcagccggttggaataaaaagagcagatcatgtttgacgggatgatggacaaaatgatcaataatgccgagtgcgatggtcatgtgcatatcgtggccgcatgcgtgcataaaaccggggtgttcagatgcaaacggaagccccgtctgctcttcaatcgacagagcgtctatatccgctctgtaggcgagcattttttccggagccgtgccgttgactttgacaaagatgccggttctccaagtttcgatttcaattctttcctccggatattggttcaatagattcagcaggtactgttgggttttatattcctgaaagccgatctccggaatgcggtgcagatctcttcggatggcaatgagccgctctttttccatatgtattcctccttgagataagaataaggcgtggattttatcatccacgcccattctatcaaaccattccttacagctggcgtaattcctgtttgatttctgttttgccttttgttttttcatcaatatctttgatttttttcgcaggtgttcccgctacaacggtatatggctcgacgtcatttacaacgatggctccggcagcgacaaccgcgcctttaccgattgttacgccttcaagcacaaccgcatttgcgccaatcacaacgtcgtcttccacgactacaggcttagcgctaggcggctcaataacgcccgctaatacagaacccgctccgatgtggcagtttttgccgacagtcgcacgtccgccgagaacaacgttcatatcaatcatcgtaccttcgccgatgactgaaccgatattaatagacgcacccatcatgataacggcattgtcgccgatttcgacttggtcgcggataatagcgccgggctcgattctcgctttaacatcttttaaatcaagcatcgggatcgcagagttgcggcggtcattttcaatgacgtaatcctcaattttgtctttgttttcttcgattgcgcttttaatttcagcccactcgccaaaaacgacgccggattggccgttcaggaatgttttagcggaatcgccaaagctgattccttcaagatcgccttttacatacacttttacaggcgttgattttgtactattttgaataaatgaaataatttcatttgcatccatcattttcatatgtattgtcctcctctgattttctacctcattactgtaacaaaggaaggatacaaagacaagaaaaaaaggaacaagcctttattctgccggctggctgcacagcgcggcaaactgtcttccgaattcccggagctcttcttcctcactgccctcagggttgttttcaattttgaccgacggcagcaccacccgcccgccgcgggttttgattactttttccaattcgtcaaccgccccgcaaaaaaactcataggacgtatctccggaaccgaacaaagcaaatgtttttcccgtaaactccaggttttccatatcttcagcaatatcgagcatttcatcaggaagatccccgtctccccacgtatatgtgcctaataaaatatactcgtaatcattaaaaagttcggcatgaagatccatcgcttcatatctgtctacggatgcttgtgcttcgatcagccctttttcaattaaatccgccatcgcctcggtgtttcctgacattgtagcgtaaacaagcaatacattccccatcttcgtctctcctttatgcataaaaactaatgtgcgagccgtaccgcctcatacggtctgacaaacttactttcgtaaaggcccgcgcaaaaaaagttttcttcccggttggccacccgccatccgtgaccgcggatcgtatcaaaccactttaattcaccggcggcgagatcagcttgataaatacgcgaaaatccgttttcgtcctgtgacgatgtgacataaataatcccgttatcctcagaaacgtcgagaaatgatttttcccgtacggcgggcccggctgtaatggcaaactcctcttgcgtccgcacgtttcggacggcaacctcgccccgttctccctttgccgcgccctttactgcaatgagccagtcattctgatacatcatcattgaagccgtcatgcgctgcctttcgcggcttatacgccggatgcgttctttcttcagatcatacgcccaaatgccgccatgattcatatgaatccgggtgccgatataaatcgtctgaccgtgtaaacaaagcgaacggatgacaggcggctcctttaattgtgaaaagggcttagccacatgccaagtgacgccgaaatcatcagataagtagaggcagtatgtgccgtgcgcacagacaaacccgtcattccgcccggcaacggcccatacggaggcgctggtcggaaaccgggacgccgtccaagtctttccctgatcggctgatctgaggacggcgcctttttctccagccgcgaatatgtagggccctatgtaagtcagcacatgaattctgcttttcacttggaacagtcttttccagccttcttccgccgaaaaatgaaaaataccttcgcctttcacagcgacaaaaaatcccgaagatactgatgccatgacagccgtcgcgcctttatgaaacatggcacttgtctccgtggtgagcggcccatgcaagaaaaccgcggacaaattctttgcagcattcctgatcctcagccgtctcgggcgccagctcaattttcagcgtttccggatataaattggctccggcctgttcaaacgcatcgcaaaacagcgtgaccgcttcgcaaaacttcgggtaggcgtgatcgcctgaaccgaaacaggccgttttcagtccgttgagctggctgtgcaggatatcttcgtaaaaatcttccgcttcgtaaggaagatcaccgtccccccatgtgtacgtgccgacaaaaacataatcatacgcttcgagagaatccgcatctgcctcgtccatgtcgagacagtcaaccgctatctgatgcccgctcagtgtttcttttataatgccggcaatatcctctgtattccccgacatgcttgcgtatatcattaatgctttctgcatatgatcacctcgtaattgataatgattttcattaacatatataacactttaaatgataatgattttcattgtcaataaaaaataaaaaaagacagcatgattgctgtctttctaaaatgggcgttcctgcttcagcatatctttaatgacagaaacaaaagcctgcacttgttttaattcaaatgccggctcatatccgagcagccatgtgtcacggccgatcggatgatcctttgtatcaagcaggggcattttatttactttatcttcctcttccaaggtgactgacggcagaatggcataaccgatcccgtgcagcgccatctgcttgcacgtttcaatctgatcgacgaggatggtctgtttcggcgaggttttgaatttttgatgccaccaatgctgaatttcctgaaaatatgtactgtcacttttgaattggataaacggccgatcggtatgggctatatcatcaatacaggaaatttccgtatcaaccaaatataaatgatcggtcattaaataatctttccggcctttccattcaggatttccccggataatgccgatatgtacctgatcttcatacagacttttcagcatttcgctgctccaccctgtaatgagagagacctttgcattcggatatcgttccacatatgtttttaacactttcggaagccagtgctgcccgataatggaggcgacggcaagctttaatgtgccgtgaatctcaccctcaagttcatcaatgttttctctgattctttcttgccgatccgtgacgtcatttgcaaattgtatgattttttctcctgccggcgttaccgtaagtcctttttgagatcttagaaagatctttgttccccaggctttttcaatggtctgcaatcgctgggacagagccggctgtgacacgaataaccgttcggcagccttcctcatgtttaattcctcagctaaaactacgagcatatgaagctcttgaagctgcatgtcgtcctccttttcaatgcctttcgtatttcttatctaccattctaataaaataaaggctgccgaggcaagcgccactcatatgtatgcgttttctttttccggcatgcaaaagaacaaataggctgatcgtgcgagcctacttattcaatgatctgatatgactgctcaactgttttaacacgactcttctcgtgaaaatgccttcaaagacgccttcatcattttcaacgcagacaaagccgttgttaatgaccatgctgaaccctttgataatcggatcattgatgtggagacggggaatgtctttcagcatgacttcctcaaccgtaatttggtccagcttctcaaactcgatccgttcaagtccgaaaatgctgttcataatcatatttgtcccgatcaaaccgtgcagacggtacgaagcgtcgaggacgggaatggcggtatagccggttttcgtcagcactaatagagcatgttcaaggttgtttccgacttgaacgtgcgccactttatccgcctcgatcataaattgtccgactgttgcatcaagaagctgatctgattgtaagctaatcatgtcacttcgacccctttacatttttcatcaaagcatgtattccctatattgcaataatataaacattatcattttttgtcgaaaagtttccgtcaataaaaaagatactctttgcaatcgagtatcaatttataggccgctgattaattttcgttccgaaaacggtcatagagcgttacgagttttttataagtggttccatcaacgctttttgaccctgcttctatatcattgatttcgctggtcaaaagctcaatggcatattcttgattgatcaggatattcagcagaagtttctgttcttcttccgtaaatcgttcactgataagactcatacgtaatcaggccccctatttttaactgaatacctctgaaagcaatgtgaaatttgctttcagctctaccgctagaataagtaaacagaaaaaaatcgtcaaccgcataattcgacattttgcggattctgtatgaaatattattttgtgtaacgattggcataactgaatgctgtgcaggaatcgggcttgattttcgcttcaatgcccatcgaggtaatgcggccggtcatttcttgtatcaattcttttgtcagtcctttttgaccgatatccagatgcacttcaaatgaaagatccgccccttcatccgtaaaaggcaagagcaaatctgtcagttccataagacggccgtcgaggatatgcgcagccatctcctggctgaatgcggtttccagcgaaattttttcgcgaaggctatgtatcggtcttgcaagatcatgatttttcaaacagccccaagctcccttgcctgtacggtgcaagtgtatagccgtaataaactttgtgaagtcgcggtaaacttgtgaatcagtccctacagacagcacgtatgctgaacgggggtctttattgacaaagcgtttcagccgctccgtcacgtcttgaaaggtcatctgtgcctcagaaagattataaaacagaaaagaatcagccatgtacggacactcctctttccagagtctacaaccaaacgaacaagcacgttcctttgcataatttaataaagctccgcttgcggaagaccggaagcttggtcagcctgaaaaatcaaatcaaattactgaaggagctcaaaaatttcaatagaaatcatgtcaatgttatcaaacggatatgtgttaggtttttcacctttttggaaaaccgtcagttcaaacgtttgatttttttcgaaatatttaacactgcaaattttttcgccgttaacttcaaaataacgctgcatcggctcgttagccgcttccgctgtttcttgcagactttgcagccgcgtgatgatacccattaattgtgacattctaaaaaaagactcctttcaaaaaacaacttcaaatcaacaagtatttattataatacaagttctacagagcatcataccataaagtagaccgggatggcattttcccgctggattttcaaaaagaaataaacgggaaaaccgtgttttcgaatagtttgaagcttttttcggaatgtcatacacctttcaaaaataatttttcgctttttgagccgccattatcagatgtatgtaaggagaagcccttttatgaggagacagcataaaaaaacttggcgggggtagcgccaagttttttcggatcttgatctgatagaggggttggggaacagagagtaacttctctctataactaaatgataatgattatcagtatcattgtcaatcgttttttaaaacttttttcaaatgaacaaaaaaagcggcatacagcagccgctttaaagtaacccgtcctgttcatataaataagagtaaggcagatcgataaataaatacatattgtcatccatcgggtatgaaaaggttctgatcatctcacctgtctcaatatcactgtacaggtcactgaaaaagccttttcttgaattccgcatcttcatgatgttttctaaaaagtacggacgccagctccagtttttctccatgtattcaggctgataaagccattcgccggactgcttgaacacatttcccgtcagctgatagccttcttcatcacacatataaattctgaaacagcagtccgtcaggttttccgccagttttttaataaactcatcgtccgcctgatgggttttcttcagctcggaaactgcctgattgacccgcttataaaaattctcagagtgttcatataccgtttccagcttctttttttctctcgtgataaattgctgaaactccgttttcaagcgtgcttttaacaggctccggtctataaaatccccgctcggcgcctgcagataatagccttgaaaaaatcggcctccgtttctccatgcgtactggagctggaaatcagcttctatatcttcatacagcagcgcggcgccgatttttctcgccagcaatgaaatgctgtacagcacatgctcatatgatggtgacggctgagataccttcagcgcctgcaaatctattttcagaaggtccggtgaaaggagcgcgattctgtccaggttgctgctctccttacctatattgtccaccgcgattttaatgccgtatgtacgatagtaggcaagcatatggtacagttgttcaatgtcgccttcgaaattgtgctcggtgatctcaagcacaatacggttcaattcaatgccctgctcttcgtattctttcaaaagctcaagaaagctttcgccgtggtcaagcatcaatacattcgcatcctgattgataaaaatcaacagatcacggtcagcttttttaaaccgctccagcgcctgcctgatgactctgtcatcgacctcaagcttatattcttccggaatgccggaatctaagaaaaacggcccgaggctctcaatctccgcatctgccaaaatccgcccaagcacttcgtagcctacgactctttgttcctcagcgttaaaaatcgcttggtaatacggaatgacatcatcaatattcgtcagtatatcaagtgggtccaacatgttatcacctgcttctctatctttgtctgattatacacaattatatcagcaccacaaatgtttagattaggggaaaaggaggcagtatggccgcagcttagtataaaagggggacatttttaagatcactcttcagaccggttaattaaggacgttattcatttgtttcacaatcacaaataaaaggataaatataagagcattataaccggcagctgtccaaaaataatggctccaatcagttctgttatatatccaatcatccacatgttccaactgaaagaaagttccttttttatctaaagtgccaaatgcaagagttgttaacccgccaacactctcggaaacgtcaactccatacattgaacccgcatgatcagtatgatgtattggcatatacgtataatcagataaaattgtttccgccagcttggctggcagagacacatataatacagccgatgtatcgcctccgagcccactcaaatactccctggctttaataaatttcgtttcatcaggaaaatcgatgtgatatagcttttcaaatctgattatttcatcagatgtaagattggtattttgataatactccggagtaaaagcacaaataataaagtaccaaatattaaagatgataacgaaactgcttacaaatagtacaacgaaccattttaataatttcttcaattaatcgccccttaatctttcaaaattatatcataattttgaatagaaaataaaacaagcgaacggcggctttaacgttcgcttgttttgcaaaataatcaatatatgaaaaattaaaacggataaggattcagccattgccccccgtccattgtgatacaatccccgtttatgtaggacgcttcatcagatagcaaaaacgctgccaacgcggcgatttcttccggtgtgcccagccggccgagcggcacactgttcatagtgcgggacaccgctttttccgattcaaacagcttctccgcaccgcctgtccgttcaatcgggcctggggctatcgcgtttgtgcggatgccgtatttgctcccccattcaacggccagcgttcttgtcagtgacaatacccccgctttagctgcagcggaatgaacgacacccgctcccgctccccatgcgtatgtagcggccatatttaagatgacgcccttctgctcctgctcgatccaatgccttgccgctgcttggctgcagaaaaatgtgccgtttaaaacaatctcaataacagctttccatccattgggtgtcagcttctctgccgggcaaataaagttgccggccgcattgttaatcagcgcatcaagccggccaaagacttttttcgcttctgaaatcatgtctgaagcggcggaatcagaacggacatccatttgaaaacaggcgacctgcccctcaaaggtttcaatttctttttttgtttcctcaagtgcttcatggttcctccctgtcaccatgacgtgccatcctaattcagcctgttttttcgccattgcttttcccatgccgcttgaaccgcctgtaatgattaccgctttcttatccataacaaacccaccccttattattgaatgaataatcattcataattttatcatagatgtctttccgcgtcattacatgctgagaagggatttttcagccaagctgatgatataatagaacaactctgacaaaggttggttttacatatggagaaaatgaccagaagaacatttttaaaaagaggattcggcattttgggtgcagctctcgcaatggcttgcggaggttacggctatgcccggtatattgaaccgcgcatgattgagatcacccgtcatacaatcaccagccgcctgatcccccgcggctttgacaattttaaaatcgttcaattcagcgatacgcatctcagtgatgtgtttacatccggtgacttgaataaagcagcggaaaagatcaatcagctgaaacccgatctgctcatctttacgggagatttaattgataagccgcatttatttaatgatcaccagcgtgcactcgccgtgctgcaaaatcttgaagctcccttcggcaaactttgtgtttacggaaaccatgaccacggaggctacggtacgaacacgtacaaggctctgatggaagcggctgattttcaagtgtttcgaaacggctatcgtcaggtgcagctgacagacggaagccggattgaactcgggtttttggatgatgtaatgctcggaaaacccgattatgaaggcaccctgtcacgcctttccgaagatgcgttttccattttaatcgtccacgagcctgatgccgctctcaagataggcggatatcccgtaaacctccagctgtcgggacacactcacggcggccaggtccagctcccgtttttcggccctctcattacgcctccttacggaaaaacgtataccgacggcatgtatacgctgcatgacacagccgtttacgtcaatcgcgggctcggtacgacaagactgccgtatcgatttttagccagaccggaaatcacgctgttcacattgaaaaccgagcaaaaataagacttttatcctgatgcacagacaccccctccgtaatatgtatatggaaaagagcaaaaaggagggtgatgaaactgctgacatatcaagtgaaacaaggagaaaccatctcaagcattgcgcaagacttcagaataagcactgctgctctccttcaggcaaatccctcaatccaatcggtcatatacgcgggacagcatattatcataccgaatcttcccgacccatccaccattccctactccatcatcgtgtatatcggagcgaagaaactggagttataccgccttggcaggctcatccgtacgtatcccatcgcagtcggaaaaatattgacgaccacgccgaccggagaattttacattgtgaaccgccagcctaagcccggcggcccgttcggcgcttattggctcagcctctctaaaattcattacggcattcacggaacaaataatccttcctccatcggcaaagcggtatcaaaaggatgcatccggatgtacaatcaggacgtcactgaacttgccgctgccgttcctaatggaacaagggtgactattataagatagaaagatcttatttgttaatggaacgagctgatgataatatattacagtgggacctttagggtaaggagcgtgtttatggatatatttaaaaatcgcaattttgtccgtctctttttcgcagcactcgcttctcaaatgggaacgactgtaggtaatatggctttcgctttttacttgctggaccatttttcaaaccagccggcatacacgactttggctgagctgatgtattcactgccgacagttttcgtatttctgattgtcggtgtcgcagctgaccggcttgacagaaaaaaagtcgcagagaattgtgactggatcagagccggactgacgatcgtattgtttgccgcattatacaccgggagcatccctctcgtgttctgtattttgttcatcagaagcgccgtgaccaagttctttttcccggcggaagccagccttgtacaagctattctgcctaaggagcattacgcgaaagcggcgggacttaaccagatcctgttcagcatcttcatggtattcggcgtcggtataggcgcgtttatgtataaaacgatcggtattcacggagccattatccttgattttgtcagctttattgtatcaggctttctgatccgcgcgtgccgcattccgaaagaagcccgtcagccgaacggcccttttaaatggggagattcgtttctgaaagactcggtcgctgattttaaggaagggatcgtatatattgttaaaaacaaattgcttgcttcccttattttcggcttttttatctttggttttgtcaacggcggctttgccgtactgccgatgtttacgatgaaatacggacttgcgcctgatcattacgaatcacatacttccatcttcaccgtcgcactcggcttcggcctgcttgcaggaagtgtgatcggaacgatgatcgcaaaaaaagtcaaaccgcatcatttgatgtcgattcctattttggcagccggactgctcatttttgtcctcggctatacggataagctgtggatttattatgcggcggctttcgtcctcggcatgtgcatcggccctgtcaatatcgccatcggcggctggatgccgaaaatcgttcatccgaaaataatgggccgggtcagcggctggcaggatccttttatgatgtttgcccaatcaattacactcggactggtcgccctgttgtttccgaaattcgttaccaatattgattacctttattacggcatgggaatcgtgattttagcggtatttgtgttctattttatcgctcttccgaaatacagcgccgaggcagcagagatcgatgtgcagcaatcattaaaggctgattctgaaaaacatgcgaaacctgtctaataaaggaaaaagatgcgcccttttcatcagaaaaaggcgtatttttataatcaatatttgcatttcaacgctaaaaaagtataatctatatatgaacttgatcaatgcaaaggagagaaataatggacgaccacgcttattcgaaagagctgcagccaaccatcgagaatctttcaaaagctgtttatactgtgaaccgccatgcaaaaaccgcccccaaccctaaatacctttatctgctgaaaaaacgggcattacaaaagcttgtgaaagaaggcaaagggaaaaaaatagggcttcacttttcaaataatcccaggtttagccaacagcagtcagacgtacttatctctatcggagactactattttcacatgcctccaacaaaagaagacttccagcatcttccgcatttaggtacgttaaatcaatcgtaccgcaatcctaaagcacaaatgtctttgacaaaagcgaaaaacgtattgcaaaaatatgtgggcttaaaggaaaaaccgcttgccgccaaaaggcagcagcccgcttatcataaacccgtatttaaaaaacttggtgagagttatttttaattccgccgcaaaaaagccgatgcgttatgcatcggcttttttctattcaatcacgtacgtatccacttttttaatgagctcgctgatttcaggcttgctgatctgttcatccgctccgactacttcgccccggtggcgcaggtcgtccgtaatcagggacgagaaaatcataatcggcacatcagagctttgcgggttatccttaaggagcttcgtcaaacgatgcccgtccattttcggcatctcaatgtcactgataatcatgtcaatatggtctgacaggtttgctccgttatccgtcagttccacgacgtaatcatacgcttcttttccgttttcaaacgtaacgatttcactgtaccccgcctcagtcagctcatccgtcaaaagacgcatcagaagcggagaatcttcaacgatgatcagttttttacccgcccgtctttcatcaaatccttcctgatggacatgataagtctcaactccggatgccgattcaatatcataaatgatcttttcataatcaggcagaaagatcatcgtctcttccagtttgatgattcccgttaaatgccgctccatcccctggttcaaggaagtcggcttttcaatcgcctcccaggacaccctgtggatttgtgaaacggaaccgacgtgaaagacgattttccgcttgttgaattccgttacgatatatttatcgtcttttgctccttcggcatcaacgccgaaaaaggtatacagactgatgacgggaagaatttcgcctctcagcttaatcatcccttctacgtctttatgagactgaggcacagatgtgacatctaccggctgaatgatttcccggactttcatcacatttatgccaaatgtattgacgcctacttcaaatttgacgatttctaattcgtttgtgcctgaatccaataaaatatcgtattgttgtaaagacaattcaatccctcgctatccgcattcagtattgtactgtatatatcggctggaaacggaaaaagtgaatgtattcggtccaactggccatgaactctttataaaaaaatgcttttttctgatatcccattgactttttgacatcgagtggtaaaatagtcaaggatttttcaggaagaagggtgtaataaatgggtacagtagtcatattcgaccaagatcaaatgacggtgttagaagatatcagcaaaacggcttacctgcaaatgaaaaaagaggcgaaagagcgtcccgacaagcccgctccatacatcttatggcgggaagacgtcagctttgaatacgggtattaatgacattcgccacatatcacaatagatagatcatgatacaatgaagacaatcatttcagctggttgtcttatttttttctgaaagaaggtatgttttcacatatcggacatatactcgggatagttcaataaaaagatgacaaatgctcagctagtggtaaaataggagaaactcaatatatagtataaggtgatgaattatggaacatttgcttaatccgaatgtaaaagaaattgaaatttcaggaattcgcaaattctcaaatcttgtagctcagcacgacaatgtcatttcgcttacgatcggtcagccggatttcttcacgccgcaccatgtcaaagcggctgccaaaaaggcaatcgacgataacgcaacggcatatactccgaatgcgggcggccttgagctgagacaggccgtacagctttatatgaagaaaaaagctgatttgaattatgaagctgaaactgaaatcatcgtcacaaccggggcaagccaagcgattgacgcgtctttgcggacgattttatctccgggcgatgaagttattctccccggaccgatatatccgggctacgaaccgatcatccgcatgtcgggcgccgttccggtccatgtggatacgacgacacacggatttaagctgacggcgcggctcattgaagaatcgctgacaccaaaaacaaaatgcgtcattcttccttatccgtcaaacccgaccggagtgacattgtctgaggaagagctgcaaaacatcgcagccgtcctgaagggcagaaatgtttttgtcctgtctgatgagatttacagcgaattaacctatgacagaccgcattattcgatcgcgtcttatttgagagaccagacgatcgtcatcaacggcctgtcaaaatcacacagcatgacgggctggagaatcggtttcattttcgcaccgaaagaaattgccaagcacatcttaaaagttcaccaatacagtgtgacatgcgcgtcttcaatctctcagaaagcggctcttgaagcggtgacaaacggtgttgatgatgcgcttattatgagagaacagtataaaaagcggcttgactatgtatatgaccgtcttgtttcaatggggcttgacgtcgtaaagccgtcaggcgcattttatatcttcccttccattaagtcattcggaatgtcatcgtttgattttagtatggctcttttagaggatgcaggtgtggctcttgtgcccggcagctcgttttcaaagttgggtgaagggtatgtgaggctgtcattcgcatattcactggatacattgagagaaggcttggaccggctggaagcatttattttaaaaacgagagaatccatgcagactatttaaacaacggcataacgccgttgttttttattgtttcgggaatgtaatatgaaaggccgtgcctctatccggtttgctgtctacttggatagctccctggtggtttttaataaggttgaatgtgaccatcagccccaggccggttcctttttctttcgttgtcagaaacggttcgcctattcgtttcagcacgttttccggtatcccgtcaccctcgtctttcaccgtcacattaacggaatactcatcttctgtcatgatgatgtgaaccgttcccccatccggcatcgactcaacggcatttttaatcagattgataaacacctgtttcagctgattttgatcaccgttaatatacatgctgtcatgttcgtaatccgttttgataaaaatccctttaagatttgcctgcgtctctaaaagagcggtcacttcacttataattttctttaagtttacacgctctttcacggcgttttgctgaggtttggcaagcattaaaagctcacttaaaattaattcgattctgctcaattcagaaaacacaatttcaaagtaatgttcgttttcctccatcgtcggcttcatgagctgtaaaaatcctttgatcgccgtcagcggattgcggatttcgtgagcgatccccgccgccagctgccctgcaatagacagcttttctgatttcagcattaattcctccgtctgcttccgctcagaaatgtcacgcagaatgacctgcacggccgtttctccgaaaaacgtcgtcggaatgcagaccatttccgtgtagatcagccggtttttaaaggtaaaccacgactgcttaatgatttctgactcggtctttcggttgataatattttggatccgctgtttcacgccgtcatgatcgcagggatgaagctgatcatagacgtttttcccgattaaatcttcataggtttcagcctcaaacagcgaaatgcccgattcattcatgaatacccacttatcattgtgaatcacggcgagcgtgtcaattgaattctgaatgaggagctgataacgctctctgcttttttgcagaatcgtttggaattttttccgtgaagaaatatcaatcagaagcagcaattccgcccgctgatttttatatgtcgtcggtgccgccttcacttctaaatgaacgggcgtgccgtcgagccttctccacgtctgttcgatcattccgacttccattcctttttgcatccgcacaattcggtttttcacaatgtcgtgatactcttcttcaataaactcataagagcgcctgccgattacctcgtctttgctttcggctcccagcatggcaagcatcgcgttgttggcgtaggcgattgtgccgttgatgctgacatataaaggattcggcagcatttcgacaagacgctcaaattcaccgtttccagccgcatcttcagactgttgttctgccatttgcttcttttgttcatacatataaggccggcggggcgtcttctcctcaagcaccttgattttgaggatgatttcccgatccgtcccctccatttgcggtgtgacaatttccacacccgcttcaagccatacaatggtatgatcttttttaataagacgaaaggtgcaaggcatcaaatgatgctcattatagaagtaactttcaaccaaaaattgatcttcttcatgcaggaacgttttgagaaatgacccgatcatctcttcctgagaataactgaaatacgatttgcagtttgcagaaatatacataatacgcccgttagacgtcaaaacggcatgaagatcggttttcgattgaaactgtttgacatgctgagtatcctgttccacagaatccctcctttgcattatactcgcactgcaggctggacacggactgatataaaaagaaattccactagattgattcgctaaaaaatgagcattctccttctattcttattgtgaacgtcaattttcctgaatgaaagaaagggcgcacgatatgttcggccgccctttcatttgttattttttattgtatttcttttcaagttctttgtaagcgtcaatggctcccttggcaatgtttttgcttacatgatctttatcatttcgaacagacggaacgacgacgctgaatgccactcttggatgttctgacggataatagccgacaaaggttagattatacgtgtacttcccccaccagtttttgttcgtgccgtaatagtgcgtctccgcggttcccgtttttccggaaacatcagcgccggaaccttggaatgttgaataagccgttccttgaggtgagcttgtgaccaatttcattcctttatgaacctgatcaaaatcgctcggactgttatttactttgttcaaaattttactatctcgctgttcaatcgcttttccaatcttatttttgctgtccggttcatgaatgcttgtgacgatccgcggctggacgcgatacccgccgtttgcgatggctgaaatatattgagccatttgaagcggcgtatacgtatcaaactgtccgatcgcaaagtcaagcagcaatcccccgaccatttgcggatttgactgcatgcccgctgattcctggggaagatcaatcccggtcttcacacccaggccgaattgggcgtagtagttgcgcattttcttaatatcgtctaatccggcaggcagcgtgccgtgcgggacgtaggtaatgccggcgatatgcatggccacatgaaacatatatacgtttgaacttctttgcagcgcggtcagctcagtaatggctcccatttgtgtccacgattgttttctcgttttgcctttaaatacaagcggtgcatcgacaaacgttttataatgcgggaggccgctttggtaacccgcgagaacagtcgctcctttaacagcagagcccatctcatattgggtcgtaaatgatccgatcgcaaaatcctgtattttatttgtttcgagatcgatgcgtttccccgccattgagaggatatccccgttgttcgggtccatcatgacggcaaatcctctgtcaaccatatagttgcctgcggcgcggcttcttctcagctctttttcaatgactttttcaactttcgactgcaattccatatcgagcgagagctgcagatcgtagcctctgctgccttcatcgacgggcttttggctgacgacttcacctttgctgttttccacatactctactttttctttatgtgcgtttaaatagtcttcatactgatattcaatgtagctttttcccacccggtcattcagtgagtatcctcttgtaacataataatctttccgttcgcccaacaatccctgttccggtgtcgtcacaccgccgaacagagagtacagtgttttgtcgtacggatatttccgcgtccagtcattaattacgtcaatgccggggagctctttcaggtgctcggatacgacagaaacttcttcatatgtcaggtcgcttttcggtttctgtttgttgttttcatgttcgtcaagcagtgacccgctgtttccgtttccgttcagcttattcgggtccattgatttgacgacttgcggctgataggcgttgccgcttgaaaaacgcgtataaatcgccgcgatttccagctcttttttattttgtttgatcgcatcaatctcctgctttgggacgcgttcaatctggcgtttgtacacttcttgcggcttcaggctgttttctgaatccttcataagcttttccgccttcttcggatgtgcggcaagccagtaatcaatgatatttcgatccttcataaattcagtatcaatatgaatcagtgcggcgagattttttgccgttttcaatttgtcctttgccgaggtttttgaggtggatacatatacaatttcaggcacagcctggttatcaaccgccaccctgttccgcttgtcatacatctttccccgcggtgtcggataataggcggtttttgcatttgccttctccgcatcctggcggtgtttatccccttcgacaatctggacgatgccgagtttaaaaatcagtgccgtaaagagaagaaaaacaatcaaaaaatagagattcattctcagcgctctgtaacgtttcgtttttttctttggttcgcgcgcaacttcagccactttctgttacacctctcaaatcattgaatatatttacataaacagattttaattgtaacatttttgtaaaagttgttacagcgaaaacgggtaaaaaaaactgtcaagatcaaattatcttaaaatatatctaacacttcaaataatttgaagagatgtaacggattttaaaaaataaatacagatcgtttttcccggtatagagccatttttctgcgctcaattacaattatgacaagagtttgttgtcaaaggaaatggctggctgcattatgacaaaaaagctgtgataagatttttcatgtagaaaaaacttctctgggaggctattaactatgaaaaaagcatttctcttatctgccgccgcggcagtcagtttgattacattcggaggcattcagcaggcatctgccaaagagctgtcatgccagcacgtcgttaccgtgaaaaaaggaaacactgtacagcatctgactcttcaagaggctgttgaaaaactacatatgaaaacgagcgtgaaaaagctgaacgttaaaaatgagaaagaactgactcagctgctgcaaaaacacgcaaagcattctgatatgacagttaaagacgttcaaaaagaaacaccggcaaaaacggccccggcagctgccgaaaaaccgaaagccgatcaaaaccagacggctgacaatgcaaagcagacagataacacaaacaacagcagcgagaaaactccttcatcagtcagtgcgtatgaaaagaaagtcgttgaattgacaaatgcagagagacaaaagcaaggcttaaaacctctgcagattgatgaaaaattaagcaaatcagctcacgcaaaatcacaagatatgaaagacaaaaactatttcgatcaccaaagtcctacttacggctcacctttcgatatgatgaagtctttcggaatcacttataaaaccgccggtgaaaatatcgccaaaggacagccgactcctgaagctgtcgttaaagcttggatgaacagtgaaggacacagaaagaacatcatgaatcctgagttcactcaaatcggtgtcggttatgtagaatcaggcaacatctggacacagcaattcatcggaaaataaataataaaaaagattgcccctgcgggcaatcttttttttatttcacccaaagcttataaatactttgagttccgctgttttcttcaccttgcgcggaaagcttgtcgtacaatgatttggcaagcgccaatccgggcatttcttctcccatcagctccgcttcttcaagggcaatgcccatgtctttaataaagtgtttcacgtaaaatccgggcgcaaaatcgcctttcagcatacggggagcgaggtttgacaatgaccagctgccagccgctccggttgtaatgcttttcagcacttgttccgggttcagaccggatttttccgcgtaagccatcgcttcagccactccgaccatccccgctgcaatcgcgatctgattacacattttcgtatgctggccgctgccggccggcccttgatactgaatgttttcccccataacagagaaaagcggcaggcatgcttcaaacgcttctttttctcctccggccataatggcaagcgttccgttcctcgcgccgatgtctccgccggaaacgggtgcatccagggcgtgaatggatttttctttggctttctccgctattttcttcgccagagacggttttgatgtcgtcatgtcaatgacaaacgccccttcttttgcatgacggagaatgccgctttcaccgagatagatttcctcgacatcactcggatagccgaccatggtaataatgatgtcagctttctctgaaaggtctttgaccgtctcctgccagaccgctcccttattcagaatctcttccgctttttgtttcgtccgcgtgtagactaaaacaggatagcccgcttctaaaatgtgcgatgccatactgtttcccatgacgcccaaaccgataaatccgaccgttttgttcactgcgctttcctcccctgatgcgatacatatatcactctttcatgtctatattaccatattataggctgatagagtccgcgttacaaggtgaatttagaaatggcgctgatcagatcttcgctcgcgctctttaacatatcagtcgattgctttactttttcaagcgtaacgagctgttcatcagtagaagcattcacttcttccgccgctgccgcagattcttgagaaatggcggagatgctttgaatcgcttcttgaatcgcggcttgttcttcactcattttttgaatgtcattgtaaatatgatctataccttgaacgagagactgcatttccgtcgtaatcagattgaggacctcacccgtttcatgaatggcgctgttttgttcatcattcattctgcttgcctcaatcatcgcgtgtgacgcttcttttgtctcagattgaatcagacggaccgtctcactgatatggccggaagaaagagctgattgttcagcaagcttgcggacttcttccgcgacgacggcaaagccccggccgctttctcccgctcttgcggcttcaatgctcgcattcagcgccaagaggttcgtctggtctgaaattgcggatattgccgtcacgacttcttctatgtttttcgtttgttcttccaggtcattcagcattgcctctacttttttcgtttctgaattggcttcgtttgacttcatcagcagctgcccgagcgcgtccaatcctttgtagctggcatcctctgaagattttgagagttgttttatgctgcctgcgcgatctgcgattccttttattttgactgagagattttctgatttttcgttgatcgtctcaacctctgacgcttgctctgtcgctccggcggcgacttcctctatcgcttttgcgatttgtccgctcgtttcatttgtttcttgtgaaatgacggttagctgctcagatgtatcagacacattttctgaggaggccttgacctgttcgaccatctctttcatattttcaaccatttggttaaagtcttttgttaactcgcctacttcatcttttgatttcgtctgagcgcggacggttaaatctcccgctgagactgaatttgttttggcaatcagctgctgaatcggcccggttatcgtttttgcgaggaaataactgaggccgatcgtaatcacaagagcaatcagtgacataaaaatgctcaccgtgttcattttatcggctactcccatcagctgatctttttcaaactgcgttccgactttccaccctgtttcttttaccgtttggtagacgaccatgttcccctgcagctctttgatgccttctttatccgcagtgaggtcttttaacgtctgatcttccgaaatattttttccctgtttttccggatgcgccagaagagagccgttttcatccgccaaaaacgcaaatcctttatacggtaccttttgctcgttgaccatgctctgaatggaggacagcttcagatctaagctcgccactccgacgacggttccgctgttttgaatggcttttgacgccgtcacgatcatgtctcccgtcactgcatctttgtaagggtcagtccagacaaccttatcgggtttttcggccgccatcttataccacgttcgatttgtcggatcatagtctttggcaaagtcggcctttggatatgtaaacatttgtttgtttgcggttccgacatacgcaagcgcgacatatttgtcattctgtccgatctgttttaactcatcattaaaaagccgcgcggtttctttgttcccatctgataaaaaagaccgggacaattcaccgcctgctaatctcattaatacggtctcatcatttttcagctgaagctcaatgttctgaccgagtgaattggtgacattctctgtcgtacgttttgcttcctccgtcatcatcggctttaatgtcaaatatgaagaaaccgttaaaaaaacaaccgttacgataagcattgccgatacaaacacagcaattttgatgtgcatttttttaaacataaccatcccctcctgagagttatatcggtctttcggccaagaaaatgaataaatcttgaaataaatatcaaacatttccgtcatttggcgcagcaaaaaaagagccgtcgtaccgacagctccgccttacgtaaaatattcgattttcgctttcgggaaataggtttcgatataagattccagtgtttcccttaaagcatgctcttcgtctttttggtatatatacttgccgattccgtagcgaccccatttgtatctgcgcttttcttcatcaagctcaagctttgttttcggatagttcttctcaatcacccgtttggccggttttgtaaaacggtgctggatcagttcaaatgtgatgtcatgccgaacgtcttcatcaagcgccgcatccagtttctcaaacagttccttatagccttcctcccagccatcgtgaatataaatcggcgccacgatgaaaccgagcggatagcccgctttagcgactttgacggcggcttctatccgtttgtcgagcggagaagttcccggttcaaagtttttaatgacataatccgcattgatgctgaatctgaacctagtctttccgttatgttttgcatcaagcaaatgatcgacgtggtgaaatttagtcacgaatctgagctgtcccaattcgctttgtccgaaatgttcaatggctctttttaatgtatgtgtcagatgatcgattcctacgatatcagacgtacaagaggcttcaaatcttgtaaattccggcgcccgttctttcatatactcatcagcctgatccagaatctcttccacattgacatatgtccgaatgtagggctttgaccccatcgtcgtctgcaggtagcaatagtggcaatgccccatacagcccgtcgcaaatggaatggcatattcggcggacggctttgaagaatcgaatttcagtgttttccggacgccgattaccaatgttgatttcgcgttccggtattgctgcaagtgattttttcccggaatattccggacttgattatgcgatgtcgtttctctgatctcaagccccatgttttcaaacttattcttcagctcttgtcctaacgggtattcgagcgctctcggttcaatataaacaagctggggcacaaacggcttcaacatagacagacactccctttacatattctcatgttgttactttccgtttaaaagagagtgaatatgcgttgtaaacatttcctttgatcaatgataccggtcttcttcaaaaagctcgctgtaaagcgcttccgcttcctcatatgtcgaaaagaccgcgtcatcttcggccagcggatgataggtttcgtataaaaacagagacagttctccctcatgatacgggtgatggacgatctccgcctctttaatatgggcaacattggccgcatgcggattgcggtaaatcacatagaccgtatcccccgctgcaaatgattttgtcataataatccctcctgttgaaagttattgttccccccttttttccgaatatgaaaaaaaccagacggcttacaccgtctggcttttgtattacttattgaatgtttctttaacgaatgcgacaacctcttctgtcgtgctcatagacaagattgtttctttgaatgattcagcttcttttttagaaagcttgctgatctgcgttcttgccggaaggatggatgtagcgctcatcgagaactcatctaagcctaagccgagaagaatcggaatcgcaatttcgtctcccgccatttctccgcacatgccgacccatttgccctctttgtgagcggcttcaataacaagggtgatcagacggagaatcgccggattgtatggctgatacagataagctacgcgctcgttcatgcggtcagcagccatcgtgtattggatcaagtcatttgttccgatactgaagaagtcaacttctgcggcaaactgatctgcgatcacggctgtagacggaatctctaccatcataccgacttcaatatcgtcagaaaccgctacaccggcttcgacgagtttttctttttcttcgagaagaatcgctttcgcctgtttaaactcgtttactgtcgcaatcatcgggaacatgatttttaagtttccgtatgtacttgcacgaagcagcgcacgaagctgagttctgaagatttcttgctcttcaaggcaaaggcggatggctctgtagcctaagaacgggttcatttctttaggtagctgcaggtaaggaagctctttgtcgccgccgatatccaatgtccgcacgacaactgattttccttccatacgctcaagaaccgttttataagcgtcaaactgctcgtcttccgtcggaagctggtcgcgtcccatgtaaaggaattccgtacggtaaagccctacagcttctcctccgttttcaagaacgccttttacatcgtcaggtgtgccgatatttgcggcaagctctacatgatggccgtctttagaaacagtcggttcattgacgagcttcgcccactcagctttttgcgccaggtaagcactgtgcttttcttcatatttctttaacgtttcactggaaggatcgatgatcacatcaccatcgatgccgtctacgattaccgtaacaccgttttcaattgtccctgtagccgcttttgtgccgacaacagccggaatttcaagcgaacgggccatgatcgcggagtgtgaagtgcgtccgccgatatcagttgtaaaaccttttacaaactggcggtttaattgcgccgtatcagacggtgtcaaatcttcagccacgataacaacctcttctgagatcatgctcgggttcggaatttccacgcccagcaggtgccccgtcacacgttttgttacgtcacggatatccgccgcacgctctttcatgtattcgttatccattgattcaaacatagtaacgaacatggaagctgtttctttcaaagcgaattcagcattgactgaatctgtgctgattttctcctttaccgggttcaacagctcaggatcactcagaactaaaaggtgcgcggagaaaatgtcagctttgtcttgtcccagttcttttaaagcatgctctttaattttttcaagctcttctttagaacgtacaatcgcttcatcaaaacggcttacttcagccgcagcatcagcaatgtttttcttttcaaccgttaagtccggctcttcaagccggtatgctttcgcaatcgcaattccggctgaagcgcctattccttttaattcttgcattactcgccgagtccttcgcttttcattgtttcttctaaagcgttaagagcatcgttttcgtcagcgcctgaagcggaaattgtgatttcagcgcctttagcgatacctagagacataacgcccatgattgacttaaggtttactgttttgccgttatattctaagtttacgtcagcatcgtatttgcttgcagtctgtacaagaactgtcgcaggacgagcgtggattccggaatctgctgttactttaaatgttttttgtgccatgattatcattctcctttaaattaaagctattttactacacaatattatatcatacagccgtacttgtcatctgacaagcacggcgtatttatatgcttattttccgattttcacaatatctttttgttcccgttttacggtaccttcggccgaaagggaaatcgcttcaccctcggcaagatttgtaaagacaatcggtgtcattaatgaaggaacatgaggtttaaccgcttcaagatcaacttcaagcagcttttgccccggttcaacccggtcaccctcagaaacaaaagaagtgaatccttcgcctttcagactgactgtgtcgattccgaaatgaatcaggatctctcttccgccgtcagactgaaggccgatcgcatgttttgtcgggaaaacattcagcacttttccgcggacaggcgatacgacgattccttcttcaggaagaatcgcaaaaccgtcacccatcatttttcctgagaacacctggtcaggcacatcggtaatcggatggatttcgccggtgatcggagaagcgaacacttcttcaccctgctcgtttcggagcggatctgcgataacctcttcaacctgctggctgacttcttcttgcgcggatactttcggttcagggcgcggcgtgcgtccggcgataatatcctgcatctgtgtttttaaaccgtcagaacgcgggccgaaaatggcctgaatgttgtttccgacttcaagaacgcctgaggcgccaagctgtttcagacgggccttatccactttcttctggtcgttgaccgtaacgcgaagtctcgtgatacaagcgtcaaggtgcttaatgttttcctgatcacccattgcctgcaggatttcataaggaaggtcgccggcttcgcctgaggcgcccgcaccttcatccgcagcctcttcttcacggcccggcgttttcagattgaactttctgatcgcaaaccggaaaccgaagtagtaaatgacggctaatcctaagccgaccggaatgacaagccaccaagccgtccggttaggcagaattccgaacaggaagtagtcaatcagaccgcctgagaaggtcataccgatttttacatgcagcagctgcataaccataaaggaaagccccgcgaatacgcagtgaatcgcaaacaggataggagccacaaacaagaatgagaattcaagcggctcggtaattcccgttaagaaacttgtcagagcggcagaacccatgattccggctacaagttttttcttttcaggcttcgcttcatgatagattgcaagcgctgccgccggaagaccgaacatcataaacggatatttccccgtcataaatgttcccgccgtcagctgtacgccgtctttgatctgagccatgaaaatccgctgatctccgcggatgatgtctccggccgcatctttatagctgaaaaattcataccagaacggcgagtagaaaatgtgatgaagaccgaacggaatcaatgaccgctcaatcatcccgaaaataaaggccgccaaggttggattcgcttccacaagacccgtggagaaagaattcagaccgtgctggatcggaggccagatcactaacataataagaccgagaattaatgcggaaattgatgtgataatcgggacgaaccgcttacccgcaaagaatccgaggtactgcggaagttcaattttataaaacttgttgaacaataacgcggccagaaccccgacgataataccgccgaacacgcccgtcgccaaagtgggtatccccagcatgttaatataggccggatggttttccgcaaaaaactttgcccgttcaattttgtcagacggaatactgccgtttgccataagcacggcgctcatggatacgttcatgaccaagtatccgataatagccgcgattccggcaacaccgtctccgttggcaagaccgatcgcaacccctactgcaaaaagaagcggcaggttgtcaaatacgatttggccggcgctttccatgacattcgccacaagctgaacgttatcattgcttaagaagtgcatgacttgaatcatatctttgttctgcatggcattccctaacgcaagcaagatccccgcagccggtaaaatcgcaaccggaagcataagagcacggccgattttctggagaacgccgaataatgctttaaacataaaagatgtacctcctctgttagctagtgtgaccttacagcgaaaattcatgacaacgaattcactggcgcaagtcttcagtttaaccgtttacatttgcccttttacacaacaaaaaaggcatgagtaaaaagggtgtgcaaaataacgggaccgttcttcccgttttttaccctcaatcactcatgcctgatcgaatcagtgacacgtttttaaggtttcaactgaaattatgaaattttattggttaatcggtacaaatgaagcgtgagataaaccgcttccgcctcatgaactggttttttcagtatttgctgcaagatttttatcagtttccaagcagtattgtagcatagcgggtattcatttttcaataataacattaacttttctggttcttttgtctgctcttcccgattaatcctgtctatggtaaatctgatatgccggatcagccgcaaatagtggacgctttctttattcactttcatctggaaagattcctcaatcacctgaacgagccgggacatcagctgtgaatgctgattgacctctgaaaggggccgattcgtcagggcggagtggatatgcagagcgataaagccgatctctccttccggaaggcagattcccgtcttttcattaatcatgccgacgacttcacgggcaatttggaattcttccggataaagcgtttcggtttccatgagaaacgggtttttaatgtcaaaaccctgctgcagccgctttaccgcaaaggcgatatggtcagtcagcgcaatatggatatgctcatttaacggttggcttgtccgcttcttgatatgataaatgacgtcattggagatgtcgacaagtgtctcgtccacataaccgaggagctttttaaattgtttttgttctttttcatcctttaagatgaacatcttgtcataccctttatcttcaatgacatccgcttgtttttttccaaagccgatcccttttccgattaagacgacctcactgtatctatcatgtgttgcgatgagcacattgttatttaataccttttcaactgtaaaggaccccttcatgatcctcagctcctttgtcattcaatacctcatatcgtacaaaacgaacggaaagcgcgtcaattctttttttagacggttgatcgttcaataaggcggtaatcaagaactttccttgccggaggcccgccgctgatccggttctcaagcatgtgaaaagcctgctttcccatttcttttgtttgtatatctattgtggaaatacctaacatcttgctgatatcatgattgtcgatgctcaaaatcgcaagctcttccgggatgggcgtcccgtttgccttggcttcaaggtaaagacctgcggatacttgatcattcgccgcaaacagcgcagtcggtttgtcatcccagctcttccatctatgaaaaagggctttcccgtcaagcagcgtcagcgccttttccacaaccagctcttccctgtaaggctgcccgatcttcttgagcgcctctttgtatgcggcaatgcgtacttgactgttttttcccttttttctggccaggctgatcgctattttccggtgtcccttttctatcagataatccagaccgtgccgaaatgcttcccgatgcggattactgatggaggaaagccctgccgcatcagtgtactggcagaggatgagcggttctttcacggtaagcagatgttcatcaggaattgctttggagcagataatcaggccgtccacttggcgctcctgtaattgtgataaagcaaaacgttctttttgctgctgataatctgtctggtataaagaaagatgcacgcctgacgcttcggcagcctcggcaatacctgcaacaaggtccgcaaaatacggaagattcaccgacggaagcacaacgccgatcatatcggaaaaacctttggataaatgcacagcatgaatgttgcgcgtatatccgagcgattgcatcgcttttttcactctttctcttttgtccttacttacataaggatgatcgtttaatactcttgaaaccgttgtaacggaaaccccggcagcgccggcaatgtctctgatcgtagccatggcgtccccctttcttttttcccttgatctggaatgcgtttcatacagtaagctagaaacagaaacagcctattcgtttgaaaggagaagaacagcgatggggattctttgcttaatcggtttgtgtctcgccatagtcggcggcagttatcttgccatgcggcccctgaatgaaaagcatgacatcaaaccatttcagcattttgatgattttttcatttaaaaggtgataaaaaaggacgctgcgtaccagaaccgtccttttttatcacaaagctttttatttcagaatcgttaattctttcggatactgcgttaatgcttcggcgccgtcttttgtgacgaacacatcgtcttcaatgcgcacgccgccgacatccggcacgtaaatccccggttctatcgtgtataccatgccttctttgaggagtgtgtcgttcgcgctgctcattgatggatattcgtgaaccgaaatcccgagtccgtggccgaggcggtgcgggaaatagtctccgtatccggctttttcaataatgccgcgggcttttaaatcgagatcgccgattctgacgcctggtttgcttaattgaagcgccgcctgttcagctttaagcaccgtttcgtaaatctcttcctgtttcgggctgattgattggtatgcgaatgttctcgtaatgtctgaacagtagccgtcaagaataacgcccagatcaaacagaacgaaatcgccttttttcaaccggtctgcacccggattcccatggggctggcctgatttttccccgaacagcaccatcgttgaaaatgacatgccctgcacgccttttttcttcagctcaaactcaatctgcgcgagtacttcggtttcactcacaccctctttgagcgccgcaacaccgacttcaactccgtaatccgcgagctttgccgcttccctgagaatgctgatttccttctcatctttcacgagacggaattggttgagcgtttcttctgccgaaacaaatgccgcgccccctgaagcttgtttgagctgttctgagcgggaaagagagatcgaatccttttcaaccgcgatggaatcaagccgcatatttcgttttgtgagctcggctttgatcagctcccacggatcttcgtgatcgccgtagccgataatatcatgctcccacccggcgttgcgggcttgtccggcttccattcccggacaaacgaaaaacggctcctgttcctgaaacaggaacaatcccattaaccgctcatgcggatccgtgtaaaaatcagttaaataaaatacgttttcctttgtatgtataaacgccgcatcatgtccttcttttttcagccaagatgaaacacgttctaatctgttcattttttgcttttcctccttaccaaagtgactctttattcattctatcagttttccggcgtttatgctgtgaacgaacatttaaaaaacagccgcccgatgtgcggctgtcatgtttattttaataatctcagtccgttcagaatgaccagaatcgtgctcccctcatgcccgatcacgccaaagggcagttccatcacctgcagaaagttagcgcagatcaaaaggcagatgaccgagagcgagaaaacaatattctgcttaataatccggttcattttccttgagagtctgcacattttcacaagcttgtgaagatcatttttcataaggactaagtcagccgtttcaagggccacgtccgtccccccgcccatcgcaataccgacgtcagcggttttcagagcgggcgcgtcattaatgccgtcccccaccatggcgattgtgccgtacgtttctttcagcttcttcacttcttttgccttttggtccggcagacaatcggcaacaaccgtcgtcatgcccgcctcttttgcaatggcagccgcagtttcagactgatcgccggtgagcatggctgttttaatgcccagtgattcaagctcagccatcacggctttggcttcaggtcggatttgatcctttaaggcgaagcagcccgcaatccggtcatcttttttaacaaagaccagtgtaaaacctttatcctttaattcttttcccgatgtttgcaaaaaagcatctgccgcatcttcacctgcaaaccccgcttttccgaccatccatttgacgccttctatttcagcctgaacaccgaatccggacgtctcgtcaatcgatagatgtcctgcgggcgcggcgccccggctttcggcaaattcagctatcgcttttgcaagcgggtggcttgattgcttttccatcgcatacaccgcctgcatgatctcatcttcactcacatgttccgcagcttgaaatgccgcgactgccggctgtcccttagtgaccgtgccggttttgtcaaatgcgatcatccgtacgcttcccagctgctctaaaaacacacttcctttaaccaataatccgttgcgggccccatttgagataagggaaagcgcagcgggcataatagaagcgacaagcgcgcacggggaggcgaccaccataaacaccatcgcccggtaaaaggtttcactccagctccagcctaaagcgaaatgaggaatgaataaaagcaaagccacggctaacagcacgcctttgacatagacactttcgaaccgctcaataaatgcctgagccggtgacacgctgttttgggctgattccaccagccggatgatttttctgaataaagactgttcatttgttttcgtcacacggaccgttaaggagccgtttccgtttaccgtccctgtaaacacagaatctccggctgttttttccgccggcatcgcttcacccgtaagcgccgattcatcgaggctcgtcacgccagactcaatgatcccgtctgctgctacgcgttcgcccggcttaatgacgatcatgtcaccgatcttaagttcagcagccggcacccgcttttcccgtccctccgcaagcagtgtcgcttcctccggttccagtttcattaaagatgttaaatcacggctgcttttattcatcgtatatgtttcgagcgcgccgcttaacgaaaaaataaagataagaacagcgccttcagcccaataaccgatcagggcggagccgacagccgcaaaaatcatcagcagttccacatttaacgccttcgtctcaatggtatcctcaattccctctttcgcttttgcaaatcccccgatcaggaaggcaaggatatacaaagtgacggacaggccttttgtttcggtaaaaaaccaggccgcaagaataaggacgccggatacgagcgccgcaatgagttctgcatgctggagccacttttttcccgcccgctcttcttgtatgtgctgttgtgaatgggtttgtgtcatcacttgttcattcattatgaattctcctctctaattgagaacgcaaatcatcttcaattccccgataaaagcaaaacagccgcctgacaggcagcattttcacagtgttatcgcagtgttttctttattatagcatgccggcggaagatttcaattataattgttttaatttctttttgataataattatcattagcgtttcttcagctgttcattatatgcaaaaaaggtgctggaggaattcctccagcacctttttatttctctgaccattcttttaattgtgaggcggtcatcggaccgacgatctttttttcgatttctcctttttcattcagcagaaatgacgtgggaatcgtcatgacatcgtattccttcataagctcgcctttcgtgtcaagaacaatcgggaaagtgagatggtgctgactgacaaagttttgaacggtatttttgtttcgctcggcattcatcaaatttaccgttacaaggcttacatcatcggactgatgctgttcataatacgtttggaactgaggcagttcttttttgcacggcggacaccacgatgtccaaaaatgcaaaatcgttttctgccctttattcggaatcgatatctcgtctccttcaatcgtcttcatcagaaacacggcgggaactgcctgtttttctgatgaggcttttgcttcaggcatccagacggcggcagctatcaaaaggactgcacatacaattaggcggtttttatgcatatgatcttcctttcacgcgtttcggatagcttgcccttccttattgaaatgtatcagccttttcagctttcgatccggggcgctgttcttccgccgcccgtcaaaaacacggagacaccgaggtctttgcagatcgtcgcgtaatgtaaacttgtcagaagaatcatgccggtattcatgccgagtataatgccgagcatttgcaattccggcatagaaccgagcacatacatcatcgaaagccctacaatgctgctccatacgttatgataaaacgccgttttcacgtggccgataccgatcagacaggcctgaagcggcatcacaaacagatgaaaaagaaaaaacggccacaaaagctgcaaataatactgcgcttccggagactgaaaaaacaaatgggtcagcgggcccgcgaactgaaacatgacccagactgccggaatgccgtagccgaatgtaataaaaatcgcttgtctcagccgtttcagcacaatatcatattgggacagcgcatacgcttctgaaatgctgggaatcatgacgaccatcagcgaatgggcgataaatgcgggaaacgaaccgattgtcatcgcaacaccggcaagcatgccgtattgatcaatcgcggctgtcccggctgccccggacgccagcagcgctcctttcactaaaaagggttcaatggcattcgtcaccgcatgaaatatacgaagtcccgttgtcgggatcgatacggccaggaggcgtttccgcacgtccttgccgcgaagatgaatgtgctgatggccggaaagcgccctcctcgccaaaataaactgcgtatacaagtaaacgaacaccacgacatcgcttgcgaccagcacaaataatgaaatgagcacggccatatcaatttcaaaagagtaccattgaaaaaagataaacagacaaagcacttgaatgatttttttcatgacattcgcaaccgcgatttttcccatttgctgcacacccataaaataacctctggcgatggatgtaaaagcgacgactggaatcagcccgatgacaatccctttaataaacgggtgatacgtatcgaatacaggaatgaacggcagcgcgatgcttgcggccgcggttgaaaacgcggtaaaaacggcggtcattctgaaggcatgccggagcatgctttcatgcagcttctgattggattccgcgatgaattttgaaatggagatcggaagctccagactggcgatgacgataatcaaaaaaatggtgggcagaatgctcatgtaaagtcccatcccatgctcgccaagctcccgcgccagtatcatattcacgacaaattccagacattccgcgaaaaaggcggcgatggataaaagaatgatccctttcacaaatcgattcatggtgtctctccttgtctctcgttcttccatcatcatatgagacaagttctgaaaatattttcgatttctcaaaattgaaaaaagcatagccgggatattttttatcccgctatgcttacatcgcaaatacgtgtctgccgatccgttcgataatttttcgggaacggatccagtggtcagatgccgttttcggattgtagaaaaacaacgcgtccgtttctcttcccggatggtcaagcgcctcatttgcggcggcgatggaatccttatccggcttttgattaatgcttccgtttgctaccggttcaaatgcattcctttgatagatcacaccccgaatggtatccgggaagccgtttttttcagtacggttcagcactacgctggctaccgcaaccttccctttataagattcacctttcgcttctgcgtgaacgagacgtgacagaagttgtctgtcagcgcgggaatacgtttttttcggcggctgataagccgtctcttccggttttgccttcttctcttggtgagatgacagctttatcggttggatagaatgcttatgatccgtttttgaaagcttcggaaccgagctttttttatttaaatcagcaaccagtgtgctgggttcttgctttggcttcttcgcaaaagtaaacagagcttctgtatgttcaatttttgatgcaggcataaaacatagaaaaaagacagccaaggcagcaaattttgtcgtcatacgatttcctccttaaatacttcactaccttaacaagagctgtgcgcaaattcacggttaaagattttccagtgctcccaatcagcttttatgatggaagaagttcgttaacagccttgttattggcaggaaaacagccgtcattttcacaacattaaccaaatagcagtaaaagtatccatcggagggattttacattttgtttacatctgttacagcaagatgaaatgagaaaccaaaaaacaaaaaaaagactcctcaagtgcgaggagccgtcagcttcttggctgttctaaatactgaaatacaacatctccgccctgctgtgcaataccgcggaaatgcttaaaatcttcctgcttcgataaaactgctcgaaatgcaagaaaatgttctttctgcaccctgaattctttgatttcaccggtgcgcatttggttgatacattctgaaatttcctcaggcagcaacgaacacagcctccttttctcggctttttcccgaaaatcaatataccatctttcccccgccgggacaatgattgagcgggctgatacccatatcgctttacttcttaaagaaaatactgcaaaatattttcaaacaggatttatgataaaggagaggaagctcgtgaaaattgctaaggttggaaacgtcattgaatttaaaaacggattaaccggtattgttgaaaaagtaaatgaaaactccgtcatcgttgatgtaaccatcatggataattatcgtgaccttgaattagattccctcactgtcgtcaaccataagaattataaaatcatcagagactcctattaacccccccgaacaatccgaaccatttacatatcccgcacaaaagctgccgcccggcagctttttcaaatgaattcagatctcggtcatttctacaaaaaaatcatcggtctcatctttattgtaaagattagtgacggatgtatagtagttggttattttaccgcggaattcaagcccacgcttgggtgccttgatgtcaaatgttttttcatacaaaaggacggcaatatcatgatacgtttcagaggtcaccttcaatataaatgaaatcatgcggccgttttcacccgcactttctttacaatcatacattttcagtcttacaccgtttaactctaacggctccataacgaacactccttctttttacaggacatgctatcatgctgaccattcctttacaattgatccgctccgaatgagaaaaaacagcgcaggcctttacaaacgtatgttccctattttataatgaaacagacgagctgccatccagcacccgtcttttcattagaaagcggcgagtggaattccccccggattcgctcgtcttttttatgtaaaaccccctcatttctgaggagaaactatatggtcgattatcaacaagtcatggttctccacgtaccttggcgccttgaatttccccatcttttaatgagagtggtcaatcaattctcatcatgttttttagataaaccagcatccattcaggatagagattcattgcaattatcttcgaattttgctttgaactataaatcattatatatttttaaacactgtattccagactgacgcatcctcttgtccaagactccagctgccaagacctttcagattatatttttgagcgagttttatttttgctctgagtgactgttcattttcaaaccataatgtatatgttcccgaaggcaacagccccttgttatcgtgattgacagtaaaaatagcttttggagattgactctttgtgtcaaaaataattgtcccgttatgcctttttactaatgagtcaacaaggtaaaggggaatggcttgagaggcagattggcctttcatccaacagcggccatagaatggcaatcctaaaactagttttttaggagagattttttgggtcagagcatattgaatggacttttccacccatcctacacttgcagtaggtccagcaaggtggctttcatcgtaggccataatcataaggtaatctgcatatttagctaaatactcgtaatcatatgatccgtgccagccctttgtccagccaaaaggatttgccgccactgcaactgatacttctttatgtctaggaatactttctcttaccaatctaacaaaatctgtaaatgaattccgatctttttctgtaaggttttctatatcgatattaactccgtccaaatccagttcttctattgcatgagaaatttgtttagctaaaagaactcggttcattaatgaaaatcgtcccaaatcctgatcccaatgattgcttagaaaaggaactacttttaattttcttctatgaagagctttaatcacatcgggattagctgaacggagaagtaatgatccatcttttctgatatagaaaaaatcaggagacacaacatttaatactccgttcgtttgatcaacgtgttgaataaaatcccatcctaatccagaatagaaatagctcatttgaaacatctcataaccccttcatccccaaaaatatcaagttccccacaaataaaaaaatgaggattgtcagttcaatttgattcgtttccgaaacctcaaaaattatctttctcttatctttataatttgtccaggataaattctatctgaagaaagcttattaagattcataagttgttgtaccgggatattgaaggatttagaaatcgtccataatgtatcgccggattccacatgatatacttcgtatgttacgggaaattccatataacgaggcgttctttttactttattcgcttgatttcttattttaggtattttccccttcattcatattactctcctttagaaaaatttgttatcaatatttctaaacagtttcgctctaatcttaatgatttgtccagcatatatttgatctgatttgaaatgattaagctccatgagttgctgcaaagaaacattatacttcctggcaattattgataatgtttcaccgggagtaacatgatggatcacgtatttttctttgagaacatctacataatgaatggtttcccctaagtttcttataattcctctgctttttagcacctcaagcattctctcggctctatgccgataggaatcattctttacagcctttttaccgtttatctgaatcttttttctctcgctatcatgattcaaatagtatttaaccttttccaatgtttcttttgaggaggaagaaacgatgagatcgcggccaggtttgaatttacctcgaactgctggtgtatccgatgtcaataaaacccccccggaaccaagaatctcataggtgcgttgcgtaagttggctttcacagttttgcaaaccgataacgacttttgctgaactgtagactttatatgcttcagtataatcaaggtatccatggatccaattgcggggaatttctcttcctatatatttactcattttttcccagtttctcccccaaaaatcaatgcgaatacccttccgtataagaggacgaataagcgtttttaaagaggacgaacggaacacttccggatgttcttcaagaaaattagggtaagcattagccaccactgctatatcacaactgtattttgctaatggtttaatctggtgatgtatactttcgtgaaatgcaaagtctaagtgagctgctttaatccccatgctttcataagttttacacagagaaggcgtaaccgtgaaaacaaaatctggtttcacctttttaattaacgggatagtaaagttttgagtgtgcagcgggtcttcagttgcccaataaacgagagggatattcacctttttagtagcgttgcgaatccaggcctgcttttcccttgaatgctctggtgtccatcccatagatactattagatctggtttaaattcgtctatcatttcagtgatattttcccgacttacaggaccggaaatcattacggtatgtcctgcttccctaaacccatttggtaaaccatagagccacatgggatgactctcgaggaaaagaattttcacacattttcgccctctctttcactttttaatgtctactttattggtatgtagaagagaaataatttgtcgcggtaccagtctataaaaaatgttcaagtgcaagataacgtgattggatatggatgccccacaaaaaaagaaagcaatctacaacatattttcctttgattttgttagcctttctgccaaaatactttcgttaataaattgtttttgtgcttaaaagaaaaagacgtacacatttgtacgtcttacattacctctgcaatagcaatttatttgcataaaagtcataataggcacgcttttatagtgattaacgattatcaatcgtctccggatacatatcatgattcatcatccgttgttcggccatttttcatattttgttcccggtctgccgtagtttgtatacgggtcaatggagattccgcctctaggcgtgaatttgtcccatacttcaatgtaacgggggttcattaattcgatcaaatcattcatgatgatgttcatgcagtcctcgtggaagaaaaggcaggtcaaagtcttgtcccataagtacttgctctagcattaatcatgaagtcacaccaatttcacaccttaccaaacgattgattttaaccttttttggggactatttgtaatctctgcgcagtgaaattatacctgtgctagcccgccatctacgaacaattcaacacccgtcaagtaactgctttcgtctgaagcaaggaaagatacagcgtttgctacttcttcaggtgtcccaacttttccagccggaacagtatttctggcattttccattgctccttcaagtgcatcaccaaaaagctcatcgtatgcaggtgtaagaatagctcctggactcaccacatttacacggatttcagtaccttttaggtcaagaatccagttgcgaaccagtgctcttaatgctgctttagaagctccatatacactaaacgctgggttgccaattgatccagcagtagagcccgttacaataatagaacctactttgtccgggaatagtgataacgctttttgaacagtaaagatggttcctttcacgttaatgtcgaacgttctatcaacctgctcttcagtaatttcacctaatggaaggaagttgccgatgcctgcattagcaaaaagaatgtccaacttacctttttcctgctttatcatgtcatatagtttgtctaagtcttcaagcttagaaatatcaccttgaacaccggttacgttcttgccaatttggttaacagctttatcaagttcgttttgtctgcgtcccgtgatataaacatatgcaccttcgtttacaaatttttgtgctgcagcaagaccaatcccacttgttccacccgttacaagcgctattttaccttcaaatttacccatacttaacactcctttagaattgattttattttatgtctagtacctttaagtacttgaagaacaacttacaagatatagtatccttcagtaagcacattatcggaagtacccacttttttgtgatatagtaactaaaaagtaataaatgcggaatggagagctttagacatgaaaaaatttagctgtgggtttgaagtgacaaaggaagtcattggcggaaaatggaaaggacttgtattatactttttaatgaatgaaccaaagagaacgagtgaattaaagcgcatgatcccaaatataactcagaaaatgctgattcaaacacttagagagcttgaagccagtggacttgtgagcagaaagatgtataatcaagtaccgccgaaggttgaatattcatccactgaacttggagaatctcttaaacctatcttgcaggagctctgtcaatggggaagccattatgcggagcaagagtatgcagaaggtgaatatgaaattgtacaaccagaacaactaaagtgaggattgatgtagctgctgaagtaaatacttcaataccatcacctaacagatgaagaacagtcagaaataaatgagatattcaattttgaaagtgaagttctaataagaagtgtcacggactatattcaggaaaactttgatgaaattcaaaaaagagctgtttcaaatgttaaagagaaggttcagaaacttagccaaaaaataaatgaaaatattgataataatatttaatgcctatgatctttagataggcattttttctttcggataaaaaagaaaagacgtacaaattgtacgccttaatctgcttctgtactatcaattttccactgcataaaagtcacagttcaggttgcacctcaggtcacacttttattgagcttagtgcgggtcacactccgtattacacaacggaataattaccgattatcaatcgtctccgggtacatatcatgattcatcatccgatgttcggccattttttcatattttgttcccggtctgccgtagtttgtatacgggtcaatcgagattccgcctcttggcgtgaatttgccccatacttcgatgtagcgggggtccattaattcgatcaaatcattcatgatgatgttcatgcagtcctcgtggaaatctccgtggttgcggaagctgaaaagatacagcttcagcgatttgctttccaccattttttcgtccggaatatagctgatgtagatggttgcaaaatccggctgtcccgttttcgggcaaagcgacgtaaattccgggcagttgaatttaacgaaataatcacggttcacgtgtttattcggaaatgattccaaaacctccggtgcatattcaaataaatagtttgtcccttgattccccaggagcgtaactccttctaattctgattcttttcttgtcatataaatctccctttctattaaactccccgtttattgccccaaagcaatgtatgcagctgaggcaggactctgacgagattcagatccgaatcggctgaaaccttatcaacgagtgtttcgtattttccaagcagatgtgcgatcaatgcccggtcgtccgtcgtatggacgttatcgtttccgacctgaagataaaacgggatattcggataccgcttgtgcacggttttcgcgaattgcagatcttcatcattaaaaatgacgacctttaaactgaccgcgttaagcctttctgccgcatcaagcgaagacacaatgtgatcgagctttgcaaaatcggttgtcatccccgaacttggcggcttcggtgaaatcgtcaggtcgttaatcattgtgaaccaatcctgatagaccgttccctgtgtttctaaagcggcgcgcaccccgttctctttcagcagcagaatcagcgcgtcaagctgctttaacagcgccgggtttcctcctgagatggtgacatgggaaaaggcgtctccgccgatttctctcagctcgcggtaaatgtcttccgccgtcatccagcggatatcttttttggcagagccgtcccatgtaaaagcggagtcgcaccagctgcaagagtagtcgcagcccgccgtgcggacgaacatggttttctggccgataaccatgccctccccttgtatcgtcggtccgaaaatttctaataccggaattcctttagccattcctatcaccttttttcgggcggtatacgcaatagcttgtcggggtttccctgacaaaaatctgcacgcagaccggctgattctccagtgtttcgaggtaggactgcaccttatcgtaaatcgttttggccacgacctcggtcgtcggcagtgaatatctgtcatcatcagcagaaaactcgtcatggtcattcagcaatgtatggtcataagcgccgtgcaccaatttcttcagcacgctgaaattcacgagaaagcccgaatcgtccagttcatcccccgcaactgtaatatttactgtatacgtgtgcccgtggactctgctgcacgctccggcgctttcgcggggaataaagtgcgcggctgagatgtgcatgtccttattcaactcaaacgaataaggatgctgaacctgcgggtaaatttgagaaagcaattagttccgctctcctttcattttcatatattcatcatatcctttattgcggagcaggcatgccgggcattcgccgcatccgtccgcaatgatgccgttatagcaagtcagtgtgttattctttacaaaatcaagcgcgccgagctcatccgcaagtttccacgtttccgctttgttcagccacataagcggcgtatgaatgacgaacggcttttccatcgccaggttgacggtgacattgcaggatttgacaaactcgtcacggcagtccgggtagccgctgaaatcagtctcgcaaacaccggtgataatgtggcgcgcgccgatttgatatgcaagaatcgatgcaaaggataaaaatacaaggttgcgtcccggcacaaaggttgtcggcagttccccgtccttcgcttcaatttcgatatcatctcttgtcagcgcattcggcgcgagctgatttaaaagagacatatcaagcaagtgatttttgacaccgagcttttcggcaatcgattttgccacatcgatttcttcttggtgacgctgattataatggaatgtaacggtttccacttcttcaaagttttgcaaagcccataataaacaagtcgtgctgtcttggcctccgctgaacaccacaactgctttttcttttttcatgtctttctctcccttatctatcattccataaaaaaagcgcctttttcggaaaaggcgccctaaaaaacataaaaaaaccgtatccaaggatacagctcgtccttagttttttatagagggtgtagctagaacctctcccgcatcaatacggattttcttcttttttcacttttgctatcataccataatgttgtttcccgtgacaataaaaaaacagcctgaaccctgtgtcaggctgcaaaatcgggtttaagccccgcgttttttccccggaaataccatcagcgcaatcccgatcagaacaaataaagcaggccagaaaacagaaaccggaatgatcggctgattcgtcaacataaagcaaagtgctgtcaaggtcagcaccgcaaccgggatgagcagcgccttctgtttcccgccgaacagccacagctcaaataaaccgaatgccgttgccaacaggtaaacaggccatgtcacaccggagtaggaccaattggttgccgtttcaaagacaaacaagatccccgtaatcaataagatgccgcccggtacgagaagtcccgcgtttttgacaggtttcgggccgaaaatcggaatgtgaaaagcggcgcccagcaaaagaatgagagcgggccagccgcgttcgctgatggcttcatttgcattggtgaatatgccgaaaatgcccgcggcgcacagaaccgccgcagcagtcaaaagccctctttgccttctgccgaacagccaggcttcaaacaggccgaacgcaacggcaaagaggtagacaggcgatgtcacatttgcgtatgtccaatccgtcagcgtttcaaaccataacaagcaacccgtcacaagcaaaatgccgcccggaataagaaggcccgatctttttttcggctgcataaaggcagcggcgtgaaacaaaagcgcggctgcgatgatcaaaagcggccacagccccgtcatcagcataccggcaaagcatagtgctcccacggctgtcaggatgaaagcaggaatcaatacacctaacttcctcccgccgaaataccacagctcaaacagaccgagagcaggcgcccatatataaacaggccacgtcacgcctgaatacgtccatcccgttgccgtttcaaaacaaaacaggcagcccagcacaaaaaacataccgcccggaacgagcagtcccgcctggtcaggcgtttttttcgcaaaaataaatccggcgtgaaaccctgcggacattataatgaaaagaaacggccacgccgaacctgcggatagatgaataactcccgccctctgtaaaaaaaacgcaatgccgatacaaataaaaataaatcccaataatacacgtcgagctttcatctcttactcctccccatcatttcccaattcattatacagaaatgtcaggaaaaaagaaggggaattcccaaaaaatacagacattttccttatatccttatttttctttcgggatttttttgcaaatcaatgcgccgatgaaagcgaggctcacatacccaaacaccggataaacggtggaaatcagctgtccgtagccgatttggctgataatgaaagcaaacgccaaaatgccgccgtaaatatatgtactttttatatgaagaaaactgtttaattgtttttccaatccgtataaattgccgatgaccgacgtaaacacttctccgaaaataataaacaaataaatgatatgaagcgaacgcgaatacgaatagacgacttgagccatcggaatgtcaaactccagcacatccggcagcaccgataatgataaaaagctcgcggcaagcaccagtgtcaacagaacgccgccaaaataagccccccttctgatcaccttctctgaagacatttcattcgcaagcggcacaagcacggcttgggcgagcgataaatttaacgcgccgtaagagacggcggacaaaagccaattccacttgtcaggccatacccattcgtccgcgtttctcgtgcttgtaaatacaaatgaatcagctgtcacgataaaagagaaggaaattaaaagcggcacaaccaatatattgacgccgaacacacctttaacgccgcttgtcatgacggcaaagctcagtacgatcgtcaaaaggatccctgcttgtgcggaccagccaagctgttcatgaaacagcgctcccgctccggagagcatgacagaggtcactcccagcaatataaacatcataaacatattaacggcgcggccgatggaattgccgaataaatatgtgttcaattcctgataagatgctgcatgaatccgtttggaaatgatcatgattttggcgcctaaatatgtaaacatcagaccgcttaccacgataccgaacagaccgatccagccaaacttcagaaaaaactcaacgatttcccgtcccgtggcaaaaccggctcctacaaccgtgcctacgtatacaaatgcaagctgacttgcagaaccttttgtttgtcccatttcaccctccggctaagcgcagatttgtccaggcctttatatatgcttatgagacaagtcgcccgaaaagacgaacaaatcgtccttccccggagaaaacagattcacctctctcctctaagcaaaaatattgaaagaaaaaaagggccagagtatactcttcatcaagaaaggtcaaagcatttcatttcctttctgactatattggtcaaaaataatcaaatctcacaaatatcacttatcatgctgtaaacatttatttttcggggtttgaaacaaaacacttgaaagtcaaagaaggtcagagtatactattaatcaaagaaggtcaaagttaagaccttattttctaatccatttggtcaaagatgatcaaacatttttcgaggaggttttggcaaatgcgttgtcaacattgtcagaaaaacgaggcgacgattcgcctgaacatgcaagtcaattccattcaaaaacaattcgttttatgtgaaacatgttatacagaattaacccgaaaaccgtctatgagcatggggccgcaatcattcggattcccgtttgagcaaggtttcgcacccaatcaaaataaacagcaggccggctctgaaaaaggcctgctcgacgagctcgctcaaaacgtcacaaacggcgcaaaagcaggtctgattgatcctgtgatcggccgcgatcatgaagtggcgcgcgtaattgaaattttgaaccgccggaataaaaacaatccggtgctgatcggtgaaccgggcgtcggtaaaacggctattgcagaaggcctcgcgcttaaaatcgctgaaggcgatgtgccgaacaaattgaaaaacaaagagcttttcctgcttgacgtcgcttctctcgtcgccaatacagggatcagaggccagtttgaagaaagaatgaaacaattaatgaacgaattaaaagaacggaaaaacgtcatcttgttcattgacgagattcaccttcttgtaggcgccggctctgccgagggatcaatggatgccgggaacatcctgaaaccggcgcttgccagaggcgagctgcaggtcatcggggcgacaacgctgaaagagtaccgccagattgaaaaagatgcggcgcttgaaagacgcttccagcctgtcatggttcacgagcctacaatagaacaagccatcagcattctggaaggcattaaagataaatatgagaaataccacggcgtcacattcagcaatgaagcgataaacgcctgtgttacgctttcatcccgttacattcaggaccgccacctgccggataaagcgatcgacttattagatgaagccggctctaaggcgaacctggagcttgataccgtaaatgaagaagatgcggctgagagactcaaagcaattgacgcggagaaaacaaaagcgcttcatgaagaaaattatgagcttgccgcgaaactgcgtgatgaagaagcggcgttggaaaagcagctggcgcatgaaacaccggcctcttcacctgaaatcggggcggagcatattcaagccattattgaacagaaaacaggcattccggtcggaaaactccaggctgatgaacaagttaaaatgaaggaacttgaagagcatcttcatcagcgcgtcatcggtcaggaaaaagccgtgaaaaaagtggcgaaagcggtcagacgaagccgcgccggcttaaaatccaaaaacagacctgtcggctccttcctctttgtcggaccgaccggagtcggaaaaaccgagttatcaaagacactcgcagatgaactgttcggtacaaaagattccattatccgtctcgatatgagtgaatacatggaaaaacacgccgtatcaaaaatcatcggttcaccgccgggatatgtcggacacgatgaagccggtcaattaacggaaaaagtgcgccgcaatccgtacagcatcgtgctgctcgatgagattgaaaaagcccaccctgatgtccagcatatgtttctgcagattatggaggacggccgtctgacagacagccagggcagaacggtcagcttcaaagataccgttttgattatgacaagcaacgctggaaccggcgaaaaacaggtgaaagtcggattccaatctgaagagagcgtcctggaagaacaaacgctgattgattcactgagcgcgttcttcaaaccggagtttttaaaccggtttgacagcatcattgaattccaatccctgaaaaaagaacatctcgtgaaaatcgtcagcctgcttctcacagagcttgaagacacattaaaagagcgcggcatcagcctgagcgtaacggacgaagcgaaagaaaaaatcgctgaaatcggctaccacccagctttcggagcacgcccgctcagaagaaccatccaagaattgatcgaggacgaaatgacagatctcttattggataacaacgaaataaaagccttccatgtcgtaatggaagaggacggcatcaaagtccgggcacaataagaaaaaagcggttccctcctcgcggggagccgcttttttgtttctttatccatgtcagaagggagaaactgtgaagaattcgggaacaatttctcaatcaccctaaagttccatgcactgccaccgatattaaccatagaaagctagtataaaggatttggtgaaaactatggataaaacatcgattatcggtatcatcctcgccttgattgctttaagcgtgggcatggtgctgaaaggggtcagcttaagcgcactcgctaacccggcagctattctgattattttgttcggtacgatttctgcggtgatcatcgcattccccggaaaagaaatcaaaaaagtgcctgccctttttaaagtgctgtttaaagaaaacaaacagctgacaattgcgcaattaattcctatgttctctcaatgggcgcaaatcgccagacgtgaaggtctgctcgcattggaagcaagcattgaagacgtggatgacgcatttttaaaaaacggcctaagcatggcggttgacggacaaagcgcagaatttatcagagatattatgactgaggaagttgaagcgatggaagacagacaccaggccggcgcagccatctttacacaagccggcacatatgcgccgacactcggcgttttgggtgcggtcatcggccttatcgccgctctttccaacatgaacaataccgaggcgctcggacatgccatcagtgcggcgtttgtcgccacccttctcgggattttcacaggatatgtactatggcatcccttcgccaacaaactgaaacgcaaatcaaagcaggaagtcaaactgcgtgaaatcatgatcgaaggcgttctgtcagtgcttgaaggacaggccccgaaagtgatcgaacaaaaacttctcatgtatcttcctgcgaatgaacgcgcaaaagtcgctgaacaagaaggagaggcaaacaatggcgagaaaaaagaagaagaagcatgatgacgagcatgtggatgagtcttggctgatcccgtacgcggatttgctcacccttcttttggctctgttcattgtattgttcgccatgagctcggtcgatgcggcgaaattccaaatgctgtctaaatcatttaacgccgtgtttaccggaggcacgggtgttcttgaatattcaagcgtcacccctcctgaaaacgaaaaagacggcgttgatcagttaaaaaaagacaaggaaaaagataaagaacagaaaaagaaagaaagagaagcagccgaccgcgaagaacttgaaggcgtgcaaaagcaagtcaatcaatttataaaaaataaaaagcttgaaactcagctggaaacaaagctgactaaagaaggactcttaattaccattaaagacagtatcttttttgattccggacgggcggatatccgtcaggaagatattccgcttgccaaggaaatctcgaatctccttgtgctgaatccgccaaggaacattatcatcagcggacatacggacaatgtaccgattaaaaactcacaatatcaatctaactggcatttaagcgtcatgcgggccgtcaacttcatggctattctgacagaaaacccgaaacttgacgcaaaagtattcagcgccaaaggtttcggagagtataaaccggccgtgtcgaacaaaaccgccgaagggcgcagcaaaaacaggcgcgtcgaggtattgatacagcctagaaacgccgcgaccgaccaaaatcagtaatataaaaaaggaagcctttcagaatggcttccttttttatttctgatgaaaatgtttagcgtttaaccccactcttttcagcatttccgtacacatttctatctcttcatcactcagcacactgatcatttctttaatttcgtcagcatgatcagggaaaatatcgtccaaaagacggattcccttttcggaaatctgtgcgaaagtcactcttctgtcagtcggcgaggcttttctgatgagaagttcttttttctctaatttgtcaacaacgtatgtaatacttccgctcgctaataaaattttgtcgccgatctgctgaagcggctgtttgcctttgtggtacagcagctcaagcaccgcaaattccgtcgggttcaggccgtgcttatgaatatgtttattcatatggtcgttaatagatcggtacgcacgtgacagtacaataaataatttcaatgagttttctgttttatccgtcatacattcaatcatccttttacaaaagaaaccgttacagagaaacattaataaacaaaatgaaaaatgtcaacaaaaatgtttccaaaatttctcttctttttgtcagaccttaataaaataatttgtttttctatcattttggttattttttcttattaaagaagtataaaaatgatataatacctctattcaagtgtaatgttggagcgatgcagagtgaatacatttaaaggtgcccggggaaagatcaagctttatctcatattggtgatcatcccggcacttattatcagctttttcatttatgaaaaagaaaagcagaaaatagccgataaacacatacaggaagccagtatgatgctcaaccttcaccgcaataagctcaattatttaatcggtgaaacaaaagcccggatgacaacacttgcgatcgctgtcgataagcctgtcaatgaagaaaagatcattgacattctcgatcaggcttttgaggatgaacccagattcagcggactgtatatgctgaattccaaaggtgatgtcatcgcaagcacgactgatctgaaatcaaaggtgaatttggccgacagaccgtattttacgaaggcgaaaaagacgaaaaaaacggtcatcacaaatgactactccagcagaattacaggccagcgcatcttcacgatctgcgtgccggtgttagacgcaaaacgggaagtcacggattatttagtagccgccatacaagtcgattatttgagaaatatgatcaatatgctgagccctgacgtttatgtcaaggcaaccaatcagaataaagtgatatttgccagcggacgggctgatcaatcagaaggtgtgaaaccggtcagcggctatctggatgatattaattggaatatcaatgtttatccgaaaccggttgagctgaacgagctgaccaaaagcgtgctgctgccgatgtccagtattgccgtgctgctgaatattctgttcatcctcgttcaatattatctgcttaagcgcaagacccagctggagcgcgctcaaaatgaagcgcagaaattggagctgatcggaacgcttgccgccagcaccgcccatgaaatccgcaacccgcttacagggatcagcggcttcattcagcttttgcagaaaaaatacaaatcggaggaagatcagctgtatttctcaattattgagcaggagattaaacgaatcaatcagattgtcagtgagtttttagtgcttggaaaacccactgctgaacggttggaagtgaactcgctgcaggatattcttgatgagattatgccgattatttattctgaagggaatctatacaatgtggaagtgaatgtggagatactcgtcaatcggccgctcaaggtcaactgcacgaaagaccatattaaacaggtgattttaaatgtcgcgaaaaacgcgctggaatccatgcaggaaggcggccggctgtccatctatttagaagcccgcgatcataaagcagtcattaaggtggccgacaacggaatgggcatttctgaagatatgcttgagcacatttttcttccgtttgtaacgtcaaaggaaaaaggcaccggcctcggccttgtcgtatgtaaacgaatcatgctgatgtacggcggttcgattgacattcaaagcgaagtcgataagggcacagaggtcaccattaccctccctgccgcttctcgatgaaaaaaacaccctggatcggggtgttttttatttaaagaagaatatgtgtaagaggatatacgagaggaacggcatcatagccggcagatagtacgaggcgcttcgtgagccgtgccagcggaaaaatgtgctgactgtacgcggtcatctttcggatgcagcgcttgatcaggaagcgcattcagtcttcgttatctgttttatcatcaatcatttgtttgcttcatatgcaggcatgacgtcaccgcgggagaacaagcctattttcttcacaaggccctgtattccttggtgatgtgtacgatcacggtttaccagctgctgatacgcgttcatcagacagtccagttcctggctgtgcctgatcgtgtcatatcctgtaaacccttgcctgttagccgcatctatcatcatttttctttttttatcaatagatacaagcaatttttcttgttcagaataactgcccattcacttcacccctcaccgctaaaagaataggaaacaagtttgattgggttattgagcattattacagattatactttatttgtaaacatttttttactaaataacttattttttcatttcatattggaatctttagcatgaatacgagaataatacccattcgggtaatgatataaacagaatgcggcatattcaagattcaaaaaacagccacagctgactttatattacaataaaaaacctctcatgccggcggggcatgagaggttcgggcgtctatcagttttgcacactttcattttcgtaaatcggcacccagccctcagtcgtcacgaagattcggattgcgacgacccggcggtcttcctgaagcgtaaagtagtggcggatgttctccggaactgaaatcaaatctcccggatttaaacggacgtcgaaaaatgtgccgtctttgccttgaatgacgaagatgccgtgtccgctgacgataaagcggacttcatcatccgtgtggtgatgttctctttggaagttttttaataattcatcaagattcggcgtggtgtctgataaagaaatgacatcctgagactgatatccgcgccgggctgaaatgtcctgaatctccgtgtcaaacgccgcgagaatccgttctttttcatcttcggttaggtcgtatttttccgaaagctcagacggaagtttttcaatgttccactgctcatagatcacctcttgttcgtctaagaagcgcgctacttcttcctgatgttcaatgagcgtatttttttcgtcatgaattctgatggtcgccattttctattcctccttttattttaccagctgcggccgaagtgacagaagcttgaggtgacagctgaataaaaattcataggcttccagcacccttttcgcttcaaatgcggtccgcccccatgccgtaatgccgtgattgcggattaacaccgcgcctgatccggcgtccgcatggtgcgcgaagttttcggccaatgccgggatgtgcgccggattgtcaatgatcggaacggtcacggacgcgttttcctcccataatccgagcgccttaatcatctcctgcccctgaaaagtgatttgtttttcatccccgtaaagctctgagatgacattattattgacggtatggacatgcagacagcagccggcgtctgtcttttggtataagtaagtatggagaagcgtttccgctgaaggttttaaagaatggcaggtctcagcgggcttcccgttctcattgattaagagaaaatcttcgtctgtttcttttcgtttgtcttttccgctcgccgtaacgagaaaagtcagcggcccgtcggatactttgatggaaagattcccgctcgttgccgggaaccagtctctttcggccagctcgcgttttacctcggcaagttcgcgccagcgttcttcttttgcagccatgcctgcacctccccgatgttttcaatgcctgttttcacctcataaaaatcttgaaaaggcagatgccggaggccgagttctttgcattcagtcaaaagataatctctcgcaaagcacatatcggacaactttgcagcctcgacatccgtgaccgaatcaccgatcataatgagaaatttctgctgatcggatagcttacggatgactgacggtttgcagcagccgcattgattggtacagtctccgtcacaggcgtgcggccagtctatatgaatatattcattgtcaaaggatgcatgattgcagaaaatccgctccttttctacgatcccttccaaaagcggatgcacaaaaaagtccattcccccgcttacgatataaaacgggaggccgtttgaccggacaaacgagacaaaatccaaaaagccgtcccgtattttcgcatccttcagaataaagccggtcagttcttcttttaagctgctcggcagcagtccgaacatccgtccgactccttcttggattgatatgcttttagacagaacaccgtcttttaattcaagccactcaggaggcgcgaattgtttcatcatgctgacaatgttgtcgttcatggtgaccgttccgtcgaaatcacaaataatcagcggtgtgcgggtcatacggcttccacccttccccatttgtctaatgcgagctgaagatctttgcacgacgcggctttttcttcaatcggctgcgcttcaagcaccgcatcaatgatggcgcggaacgcttttcccccgccctcggctcctttcggatggccgtgaatgcctccgccggcattgatgatgtgatcgatgccgaaatcgcgcatcaacaatggcaccataccggggtgaatgcctgctgacgggacggcaaacgacggatgaaagacatcgtcttttacacattcatcatggattgcaagcgcggactccttcggaagagcaacggatccgtaaggtgacggaaataaactgaaatcagcgccgcaatagcggttcagcttgccgagcaaaagcgcatgcgacaagccgtaaacgggagatgatgtgaacgcgccgctgactgccggatgcgccatgatcggaagcgggatttccctgtcttcagcaaggctctgcatcacatctaaaccgtaagcgaacacattcaataaaagcgcgtccgccccgagttctgccgcgcgcctcgctttatcccgcaattcagcggtccttcccgtaaggtttacggcatacagcgttttatgccccgtctcctcccgggtttccttcaggacttgttttccttcgataatgcgggtttcaaacggagccagttcattttcaaagaaaatttcgtcatctttaatcagatccacgccgccgagcgcctgctgtctgagctgttctttaatgtcggcgagatcccgtccgatcacgcctttaaatatgctcatcagaagcggtctttcaaattcgcccagcagtttgcggatgccgtatataccgaatttcggcccgggaagggagcgtttaaacccttcggaaaattcaagatcagtcaattttatttttccgtccagtgacagctttccgaataccgtcgtcaggacggccggaatatctcttgaaaagttcgcctcgggataggcgatggtgatgacggattgtgtttcgttttctgaggttccttctttctcctcaacttttacgacccgccctttatgttttctgagctgttcctgcttcaccaggggcaggtcagtccaggagcctaccgtcagccccgccgcaatctgttccgcccgcttttcactgtccgttgtgtctgtcagaagatatgttgccaatacttcgctcatgcgtgaacgcctctctttctttcgcaaaacataaaaaaacctcttccgtatgagcagaaagaggcttcgtgttatgtccgaatcttatctctcagctcctgctgcaagaattagcaccgtgctttatcagtcggttgccgggcttcatcgggctcgtccctctgcctgctcttgataagaataatgattttataaagtattttgaattatcgcattgttattctgatatgtcaatgctttttcgggtgaaaagattcagtttcccgatccgttccgcagcttctttaagtctttcttcacttgtcagaagaccgactcttatatagccttccccccattttccgaacccgtttccggcagcgaccgcgacatccgctttctcgagcagcaggtctgaaaacgactgtgacgtataaccgtcaggcacagggagccatgcaaaaaaagagcccgccggagccgttacatcccagccgatatcgcggcaggctttaatccatgcattgcgtctcgattcatatctgtcattttgcgccgcgacgcatgcctgatccgctaaaagtgcggctgccgccgcctgctgcgccgcgggaaacaggctgacaaacatatgatcctgataaaggttgatcgcttcgatgacagaagcgtttccgacagcaaatccgacccgccagcccgccatattatacgttttggacaaggtatagatttcgattcccgtctcttttgcgccttcggtctgcaaaaagctcagcggtttatgcccgtcaaagccgacggctccgtacgcgaaatcatgaacgacacaaatgccgttttgctccgcaaaaccgaccgtctcctcaaaaaacgcctctgtcgccacagcgccggtcggattattcggataattgagatacagcagcttcgcctcgctccgcaccttttcaggaattacgctgtaatcagggagaaaccctctttcttccgtcagcggcatcatttccattttcgcttttgcaagggcgacgcctgaccagtaatcaggatatccgggatcaggcaccagaatggtatctcccgggtttaaaagacattgcggaagctcaacaagtcccgccttgcctccgaacagcacggcgacttccgtttccggatcaagcgtgaccccgtactccctttcataaaatgcagcggctgcttttttgaagctgtaagcgccccggaatgatgagtatttatgattttccggcctttcgacggcgcgcttcatttcttcaacgatatgctgtggcgtcggctgatcagggtttccctgccctaaattgatgacgtctctgccttctttcagcttttgattcactttttgcaccaatgatgcgaaaaattgttccggcagctgtttgagtacatctgagatttcaaagttcatattttcaccttctaaaaatgtcttgaaatgatagtccatcatcatatatggttaaataaaaaaagtaaagagaaacttgaggtgttaaaaaatgaaatggaccgtttcctgtttgcaatttgatatttcatacggaaatccttcagaaaactttaaaaaagcagaatctttgattgagcaggaaagccgccatgcggatgtaatcgtgcttcctgagttgtggacgaccggctatgatctcacacggctagaccagcttgcggatgaaaacggcaaagtttcggaacaatggcttaaagaaacggcaaaaacatacaacgtacacctcgttgccggatcttttgcggtcaaagaaggcaaaaatgtctataacaccatgtacatcgccgataacagcggacagatcgtgaagcggtatcagaaagcccatctgtttcagctgatggatgaacacctttacttgtcagcaggaaacagcgacggttcctttgagcttgacggtgtcaagtgcgccgggctgatctgctatgatatccgtttccccgaatggatcagaaagcatacgtcccagggcgcgaatgtcctgtttatctctgcggaatggcctctgccccgccttgatcattggcgaagcctgcttatcgccagagcaattgaaaaccaatgttttgtcgcagcctctaactgcacggggtccaatcccgataatgaatttgccggccacagcctgattattgacccgtggggccggattttagccgaaggagaccggacggaaggcgcagtccgagcggaaatcgatgtgtcagaaagcgcggccgttcgcggaaccattccggttttccaagacttacggcgtgatttatattaattttcaaaaaaacgttgacaagaatatccggcacctgctaatattttcatcaactgattaatccgaattgtgatacaaatcaatatatttttctcttatcgagagttgggcgagggattggccttttgaccccaacagcaaccgaccgtaattccattgtgaaatggggcgcgtacattttgcgccgagacgattgtctcataaggcacggtgctaattccatcagatgttatctgagagataagaggcggactgcactgtttcagcctccttctctttcagagaaggaggctttttttcgggcgtattctccgtcacgatctcttactgccactacataattggagggtaaatccatgtcagcaactaaaacaagtctttatgaacaattaacagaaagctccgccgccgcgttagccgtcaagctcggcttattccaaaacaaaagcactctgacatgccgtgaaatcggcgacggcaatttaaattacgtctttcatgtttacgataaagaaaacaaaaaaggactgattatcaaacaggcgattccttacgcgaaagtcgtcggtgaaagctggccgcttaccattgaccgggcgagaatcgaaagcagcgccctcatccgccagggcgaacacgtgccgcacctcgttccggccgtttactattccgatactgaaatggccgtcacggtaatggaagacctctcgcatttgcgaatttcaagaaaagggctgctggaagggcagcattatccgaacttatcggttcatatcggtgaatttttagggaaaacgctgttttactcatctgattatgcgcttgatgcgaaagtaaagcagcagctcgcaaagcagtttacaaatcctgagctttgcaatattacggaaaggcttgtgtttacagaaccgtttctcgaccatgagacaaacgattttgaagaggagctgcgcccatacgcagaaaaagtttggaacaattcccggctgaaacaaggcgctgacgaattgaaagccatctttctgaattccgcggaaacattggttcacggcgatctgcacacaggaagcatcttcgccgatgaacatgaaacaaaggtgattgatcccgagtttgctttcttcggaccgatcgggtttgacatcggccaatttatcgccaatctgctgttaaacgccctcagccgcgacggtgacgacagacagccgttatatgatcatactgccgccgtatgggatacatttgtgaaaacattcagtgaagcatgggagaaagactgcttgccttcccgcagacacctgctggaagacacactgaaaaacgcgtttgaggaagcggtcggttttgcgggatgcgaactgatccggcgcacgatcggactcgctcatgtggctgacttagatgaaatcactccgtttgacaaacgaatcgaacggaagaagctggcgcttgacatcggcgcctattatatcgaaaacagaaaagaactgaagcatatcaccgaggttctggaccaatttaagctccgtgtaaaggaatgatgcagcatgaccaatgaatttgccatcccccgttctgtagaatggaaagaaacctacatccgcattttaaatcagcaaaagcttcccgacgtcactgaatatgtggaacttgaaacaaaggaagatgtattcgacgcgattgtcacgctgaaagtaaggggcgccccggccatcggtataaccgcggcgttcggactcgcgctctccgccaagtcgtttgaagcccgcgatctttcagatttccgacgtcagttcgcagatgtcaaaacgtatttaaacagttcgaggcccactgccgtcaacctcgcgtgggcgcttgacagactgacggattcgatcagggatgcgatctcaatcaatgaagcgaagacaacgctcgttcatgaagccattcaaattcagattgaggatgaagaaacatgccgtatgatcggccaaaatgcgctgcacctttttaaaaaaggcgaccagatcatgaccatctgcaatgcgggctcgatcgccacaagccggtacggtacggcgcttgctcccttttacttagcaaaacaaaaagacctcggccttcatatctacgcatgtgaaacaagacccgttctccaaggatcacggctgacggcgtgggagctgatgcagggcggaattgatgtcacgctcattaccgacagcatggccgcccatacaatgaaggaaaaacatatttctgcagtcattgtcggcgctgacagaattgcaaaaaacggtgatacggccaacaaaatcggaacgtacggcctcgctattttggcaaacgcctttcaaattccgttttttgttgccgcaccgctttcgacatttgacttgcagattgaaaacggcgatcagattccgattgaagaaagagatccggatgaagtcagacagatctccggcatacgcaccgctcccgaggatgtgccggtcttcaatccggcctttgacatcacaccgggcagcctgatttccggcattataaccgagaaaggaattgtgaccggctcttacacggaagaaattgaacaattattcgctgactgccagctaagctgaaaaaccgctgatgatattgcctcaggcaatgtcagcggtttttttgtctgcacaatgtaatcacttcatctttttggacggctgtaatgagatgcattttaaaaaacagctctgcataaccggctatcttttgcggacggctcattttcatcaggcttcgtcctcctttttcatcagaccaacttttttcacttaataaaatgatatgtcggacgtgaaaaaacggaacgtgccatacgctttatttttctttataggatatttgttcgatgttcagcagcaccgcttttacatccgtcttcgtgccagcgtatcccgttaaggcgctgtttttgccgattacccgatggcacgggatcaaaatgggcagccggtttcgtttattggcttgtccgatggcgcgcaccgctttcggtttcccgatcgcttcagccatatcgccgtagcttcgggattccccgtaaggaatcatcgtcagcgcgttccataccctttcctgaaagggtgtgcctttttgtctcagaggcagagagaattgctttctttctccagaaaaatatgatgccagctgctgtttcgcctccgacagcaaagcggtttcgcacggctttacgccgggcgcatctttccgccattcctcaaaatcttccccggtgagaaacaggccggtaataaagctctcttcctctgttacgatgacggttccaaacggtactttcatacttgtaaaacagatcattcgccgctccttctttcttcggtattctgccggatcggaagcgtcaaatgaaaaacggtgcccttcccttcttcactttccacatgaatgcgtccctgatgttcttcgatgattttatagctgaccatgagaccgagacccgttcccctgtcttttgtcgtgtaaaatggttcacccagacgttttaatttgtcttcggaaatgcctgttccttcatcttgaatagaaatcaaaatgtggtcttgatcagaagactgaatggtcacgtagatattgccgccgcccggcatgacttcaatggcgttttttaaaatattgataaacacctgttttaattgattcggttcacagtaaatcggcgggatgtttccggtcaggttcagatggatctgcacattgacaagattggcctgggcattcaaaagatcagccgtatctttcataatctgcgtcacgtctttttcttcatataatatcgcctggggtttcgctaaaattaaaaattcagtgatgatagactcgatgcgttttaattctgaggtaatgacgttaaagtacagagaatattcgccttcaatgcttccttgaagaagctgaatgaatcctttcagcgccgtcatcgggtttctgatttcgtgggcgatgcccgccgccagctcccctacaacatgaagagtgtcggatttccgcagcctctcttcaagctctttggcctctgtgacatctttaaagatggccagattcatattttgaatgatatttcttttgaaggagaattccagtttgcggctgtcgctgctgcttaacaggaaggggatttcattatccattccttctaaatcaatctttctggcgggaacacccgcgttttcaatatcaaataaagaaagaatatccggaacggtgtacgctctcagctcctcatccggcataccgagtatacggcttgcgagaggattcgcgtcaataatgcggaattggttgtcaaataagaccttgccgtccattgagccgttgaatacttttctgaatttcagctcgctttcccgcaattctttttccatccgcttacgatcgctgacatttcttaaaatggttaaatgctgaccttcaagtatggttcgttttgatgtgaattccagctctttaaattggccgtttgccatctgaaacagcatttcttcacggatttccccgtatttttcatattttttcttaatctgcttatattttttctgcggatcaacgataaacgtacataaattcgtctccaccagcttatccatcggcagttcgaaaatgcggcacgccgattcgtttgctttggcaatctttccgtcatcagaccaaatgacaatcgcgtccatggcgttttcaaaaatttcgcggaatcgctcttcgcttttaaaaagtttcaattccatcaaccgtttctctgttatgtccctcataatggacatgtagaacccgctgattaagttggacgtaatcgtaaattcaaacagcttctcttcgcccgaccgaagcttgacgggcagttctcctttggcgtttccttttctgcggagggtttcccagatttctttcagatgctttttgttttctccgtcggtaaaatggcggagcgacagatgggacaattcattctggccgatctcaaagcttttgcaaaaagagaggttcgcatcaataaacccgccgtccttatcaaacagcacgatgccgtcgacagccctgtcaaacaaatctttaaacagctgctcgttcatggagaattcgcgctctaatatttttttagaggagatatccctcatcaccacaaaaaaataatcctccccaattccgtctctggcgaggaattcaatgtatttcgtcgcgccgctgtcaagcttaatcggcacctctttccacagatggcctttttttaaaaactttttcacggccttattcagttcttcctgaggcacggaatataaaaaatccaggacggagcggttaatgaggttctctgcctcaatctgcatcatccgggccgcagcctcgttcgcctggacgattttcatttccttacggcatataaaaatggcatcaagcgtgttattcataatcacgtgataccggttcaaatcactcttcaggcggtcattttcctctttcatccgcttcagctgctctttcagcgactcttttgtttgcaaatccagagtttcagccattcagtacactccttcttcaaaaacctatccttcaatatttctacaaaatacctcatcttccttcattcgccctatacatttcagaaaatttcaatgatatgacaagttaaagtctttttctacgatccttacctccccattacatcatcctaacaatcacttttgtcctccttcaattttttgttttttattttaaaatgaacaccaacaggaaataatcatgcagtggatgatttttgaagagaaggtgatgctatgacaaaatcgcgagacagttactttgacaacgccaagtttatcttgatttttctggtggtgttcggccatatcctccggtcatttattaacggaaatgagtttatgctccatctctacaaattcatttatacttttcatatgccggcctttatcctggtttccggctatttcgcaaaaaactttaagcggaaaggttatgtgaagaagctggctgtgaagctgattattccgtacttgatttttcagggcatttactcagttttttactatttgattcaggatgaaagcatggcaagcgtcaatccgattgatccgcagtggtctctctggtttttagtcagcttattcttttggaatctgctgctttacccctttacgaagctgccgaaaatgtgggcgcttggggcgagctgcgggcttgccgtcatgatcgggtatcttgattttatcagcagcacgctgagtctttcacggacgtttgtttttctaccgatgtttcttgtcgggttttatttaaagaaacagcactttgatttgcttcgggctaaaagaggcaggcagattgccgcgggcgtactggggattgttttcctcttatgctggtgtattgattttgattactcgtggctgttcggttcggagccttattctacattcggcacagtgtcgctgttgagcggtctgtcgcgcatcggctggtatgttttggcctttgccgccactttcagctttttggcgctcgttccgcaaaagcgttatttctttacgaaatggggtacgagaacgttttacgtgtatctgctgcatggattcattataaaaacgctgcggcagatcgggcttgaagatcacttgtctgattatcagaatttagtcatgctcttaattttaacggccgctcttacgtccattctctccagcaatgcggtgaaaacggccgcacagccgtttattgagctgcggatcaccggctggcttgaagcggtgaaaggaacaagaaacggtgcttattcgaaataatgcaaaatacctcttaagcgttatcgcctaagaggtattttttattgtttgccgtcttcttttttctttggcttcgtctgttcaagcgtttcaatccattttccggcgttataatcaccgagctcgcttgcaaactcttcttcaagcaatttagggtccatcggctttttatggttttgcatgtctttgctgtggcggttttttttcgtcatgttactcgcctccttgtttgccgtgttttgatttgcggtttgcgcctctcagtccgggatcaccgtcatattgtgttttgtatgcatctttgtccatgctctcagtcggtgtgttgttgttggtcaaagcttcattctttgctgctttgcgtttcatttgatttcctccttctgtcagcaaatctgttttgaattcatcaagcatttttttcaagtcgcgcactgtcacgtttttggcctcatcaatgagttcatagccgatctgtccgttcggctcaagcagcacatatttaaaatcttgaatgtttccgaggccttcctgcctgatcctcattgacagctgagcttcggtaaaacgcattttttttaagttttccgggatgatttttccgtttctgacaacggcgacggtttttcctgaaaataaaaactcaaaaaagcttgatttgatttctaaatattccatcaggattaataccgcaataaaaatcgccgccgcgaaaatagtttcccataaattatgttcaataaacggctgaataataatcgagccgatcgaaatcatgatgactgtctgggtcaccgacagctggctgattgatttccgtccggcaatccgcaataaaaaggtaccgaccgctatcataactaccgacttccaaaatacggcaaacaatgacgtcacctctttacaagtagaatctccaaagaaactgtttccactcatccattttacggcaataaaaaacaccgctttctgaaaagcggtgtcagccgataattattctttccttcggatagtgataatttgcttcgatttcttttcggccgatcagataaaggaacgtcaaaatgccgatccggccgataaacatgacaatcatgatgacgcattttccgatgtcgcttaaatgcggagtaatcccaagcgacaggccggtcgttccgaatgcggaacacacttcaaacagcagtccgagcagcgtctgatttgtctccgtcacggccagaatcagcgtcgatccgaacacgagcagaatcgccatcatcgtaacgaccagcgacttcatgacatcagcctggtgaagctcgcgtttaaagaccttgaccgctttattcccccgggcaaaatgaaacagggcaagaaggttaagcgcaaacgtcgtcgtacggattccgccgccgaccgagctcggtgatgcgccgatgaacatgagggcgcagatgaaaaataatgtcggcgccgacagctggctgatgtcaattgtcgcaagcccgccgcttcgcgtagcggttgattgaaagagacataaaaataaaacatcatgccagcttttccccttcatgacatggcttgcttcaagcgcgtaaatgcccacggctccgaacaaaacgagcattccgaacgtaacggtcgtaattttcgtaaacagcgtgaatgagtatctgcgctgttttgaaaacaaaaagtcctttacttctacgagcaccggaaaaccgatcgcaccgaaaataatcagaatcatcgtaataaactgcacgaaatagtcatgtctgaacgggacgagtgaatttcccgtaatatcaaaaccgccgtttgtcgtggcgctgacgctcgcaaagaatccgtgcaagtacgcctgttcaaacgaatcataatacgttaaaaaatatgttcctaagatgatgccgcctaaaaactcgattaataaaatcaaaaacagtacttgcttcatcaggttgacgataccggaaaactgcgattgattctgatccaccatgatgagcttccgttcccgcagaccgatccgtttgcccataatgagccagacgaatgttccgagcgtcatgatgccgattccgccgaattgaagcacgaaagccaaaatgacaatcccggccgtgctgaatgtatcagccgtgttgacgaccgttaaaccggtgacactgactgagctgacagccgtaaacagcgcgtctataaacgaccagctggccccttgtttgtgggcggccggcagacttagcaaaataaatgccaccgtcacagcaagaaaataatataatgcaatcagctgtgcaggcgacaagatctgtatgaatttcttcagtgttaatttcataagatagttccttctgcctctcaaatgtagtacgtaattattctaatgatattgggagtatttttaaagggctttttagaaagatttttcattaccttatgtaatttgccgatctttaaacaaaaaacctctgaaacgattgtcagaggttttgttgattattttgcttccagcctgcggatgcgctcatcgagatcagggtgtgtggagaacagtgacgaatgctttttgccgttaatttttaacgtctgcaccgccgtctggtcttcttcattcacatgtcctgtataagacttcagcgtacgcagggcgtgaatcattttatccttgccggcaaggtctgcaccgccgcggtcagcgtgaaactctctgtggcgcgagtaggcgaagacgacaagactgccgagaatggaaaagataatctgaaacacgatcatcgcgataaaatgaacgaccggcgcgaggtcttctttgacaaagcggcttgcaacccatgccgcgattcgggaaaggaatacgacgaacgtattgacgattccctgcagcagcgtcatcgtgaccatatcaccgtttgtgatgtgtgcgacttcatgggcaaggaccccttccaccgcagcatcatccatctgctgcaataaacctgaagaaaccgcgacaagcgaacggcgcttagaaggtccggtcgcaaaagcattgacctccggggaatgataaatgccgacttcaggcattttcgtcatccctgcggcacgggacaatctgtgcacacggtcaaccaattgctgttcttcatagctgagcgactgtttctttggatttaacacccggacgcccatcatcgttttggccatccatctggacattccgagagaaataaaagaaccgacaaaaccgacgacaagactgaacacgagcaatgccatcagatcaatgcggccattttgtatatacgagccgacaccggtaacgcttgtaataatcgtaagcacaattccgattgtcgtaatgaccaaaaggttcgttaaaataaacagaaatattcttttcgccataattacctccgtcttttttaagatcaaaagaacttatttacttaaattataaatgatctgtttgaaaatgcaacaatttcgacgtatgatgttaatgtaattcccattgatattaaaaagtaacacgtaatcaatcagaggtgaaccatgaacacgtttaaactgacccgaactgatatggtccggcttctttacgcgctaaaaggccaaggagacgcaacccctctccaaatcttattgcaatcagcggatatgaccttggatgaagcggaaagccgtctgcatatccctgaatttctgacgagattcgaacgaaaaaaagagaaaaaggaatacgggctttcaactaacgagattgtcgagctgggaaatctgtgcgagctgacgtctttaaaatcaaccgccgtccaaaactgggtgaagcgcgatattaaagatttaatcggccaccccttactcggcaaaaaatatacaattgaacaagctgtcatccttctcattgtacgtgatttaaaatcaatttatgacttcgaacatatacgcggcatattaaaaatcgcttttaacacgatcacagacagatcagacgacgtcatcagcccgatcagctactatgaaagctgcgcccaagtgattgattatcttcatcataaggcaaacccgccgatgaaggaaacgagcctgcaggagctcgtcgaagagcagacggacaagctcaaaagctgctttaaagaactcggaggcagacaatggaacaatatcagatccataatcgccgtcacggtgctctccgttttgactttccatattcaagcctcagcctacaaaatgacgagccatttattataattcataacgcttcttcgccccggtgtctgcgccggggtttttttgctgtacaacaattgccagcataatcaataccgttccgtttgaaactaaaatgcgaaaacacatcttgccagagaaaaggagatgaaaaagatggcgagcagaaataaactcttagttccaggggctgagcaggcacttgaccaatttaaatacgaagtggctcaagaattcggcgtgaaccttagctctgatacagcagcacgcgcaaacggctctgtaggcggggaaatgacaaaacgtcttgtacagcaggctcaatcacaattaaacgggaaaaatcaataatgcagcttattcgccgggacttctcggcgaattttgatatttatcggcattctcctttccgtgccggtagccattcggattccttcggtctgatgaatcttcatgatgccgataggattcccaatgttcattgcgatcatgattccagtaatgattgtaatacttttgcttaggctctttgtcatttccgttttcctgaggattttgtgttgggggctgctctgtttccccatcttgttccttctgtgtgttttcctctgatccggaagctgcatttttttcggtttgctgattgccgtcctgactgtccggcttcgcttcttccgtaccgggcgttgtttcattgtttcccggcttctctgctgccttttcttcatcaggagctgtcttttcatcagccgccggcttttctgtgtccggctgctcgctttgatcagcgtctgtttcggtatctttttgatctgtttcattgccgtcggtttgcttttcaggctgtttttcgtctgttttcttttcgtttcttcttatgtagctgcctgttgacatcccttcctgttttgctttttctcttgtttccatatcagattcaagcgattggacctggtaggtgcccttatatttttcagtcatgtcggccagctgttttttaacgccttttttatatgtattgtcatctgtattttcataaaccgtggaaattaaaatctcttttgattcctttacatatccatgcttgctgcaatcggtaataatattactgatgacttccttaaaatcgctgcttttccaatctccgatgtcactgatgacctgtttggcgtcatggttcagcggtgtcagttcaatgacttcatatttgctgtttaaagccatttcaatgctgggattaatgtcaagcgtcatatacgcgtaagctttgttatcagaaaaaaccgggagcaaaattaaaataaacaaaataatagcagtcatcgtaaacactcccaatttaaaagggcgcagtttcagaaaatcaaaaaagctggcccttcttcccatacgcgtttcgccttcgaacgtaatttcctctccgatttcacaagtgcggtgatcattttttgtttttaaaaattgtccgtcaggggttagcaacgtgacgaattttttatttttctctactatgatccctcttctcatgagtgcaacacccctttaagataatcttttaaataaatataatcaccggtaataataatactcatggcgatgatatattttcggttccgttcgatcgtttttctgctgaccgacacgagctgctccagctgcttgacaggaagctgttttttctggtgcaaaatggacgccagctcttcattttcaacaagcgtgtaggctaccttaatcgcattctgcctcgcatctgtatgcttcggcgattgttccagcagctctttaaaagacaggccgtattctttcagctgcttctgaaaaaaaagaatttcttcccggcgctgttcctgttctatctgtttgcggtattcatcaatggaaagctccgcttcgataaggctctgcgaagattcctggtcgtcgccttcctgcacatccatattgatatgctgagcggttcttgcttcttttctgatatagtctatcacttttctttttataatcagctctgcaaatgcaagcagcgaattacctttttcagccgaatatttttcaatggcttcgttaaacgcgatcagcccgatgctgaattcgtcgtctttttcatctatatatcgtttacaaacggatgaaaccgtcttcgcgataaaaggcttatattgctgtattaaatcgttctgcagatctttgtcgcctttttgtattttttcaacagatgtttcaagcgtttgcttcttttttcccaatttaaacaaaaggctaagcactggtttcacctcagttcctccctataactactcataatcatagctaatttagtagggattcgcaaaggaagaaaaagagaaatcgatttcatttgtctcaattatgacaagccaataagacgtactatacatgatttcgtgcccccatgcagaattaagggggttttctctgtgttttttgtaacaatgctgttataaaattgttatcatatgtcttaaatgtaagcgtttcaaacaaaaaagggaacctgctttataaaaagccagactccctttttgatcattttacgcgtgttctcttttttccgattccgcgtcagactctatttgttttgctcctgacataaaccatccgcaaaccgcaatggcagccagaaccgcccagaaaatgattttccaggccgccgaatggatgacatctgccggaatgataccgagttcctcatgagccaatgtataaagagcgagcttcacgcctacccatccgacaatcacaaatgccgccgtttcaaggcccggcctggttttcagtaaggatacgaacatcgatgccgcaaaacgcataatgattaaaccgattacgccgccggctaaaataacgagaaactgaccgccgtccaagccgccgatggcaggaagctgagttcccgggagcgttacggcaagcgcgaccgccgctaaaatggagtcaacggcaaaagcgatgtccgcgagctccactttcaagacagtctgccaaaacccgctttctttctgcattttctgaccggcgttatctttaaatacataccgcttcagcaaatggctgaccgcaatgtaaaacagatataacgcgccgacggcctggacctgccaaacattcaccagaaaagaaatggcgaacagcgacccgaaacgcaaaataaatgcgcccgccaatccgtaaaataaagccttcttcctttgtttttcaggaagatgcttcaccatcacagccatcaccagcgcgttatccgccgccaaaatcccttcaagcccgattaaaacgagaagaacccatccatactccaataataatgcaaagtccaatccattccctccgtttcttttttctatcatccgagcttataccggcggttttttacgcaaaaaagacctttgccgatataaggcaaaggtcttgctagacatgaatgattggcatgccaacaaagccgatggatataatccatgaattgacgactttgtttccggaatatccggacgctactcccctttgggatttcaagaaatatttgtttatacgcatatgataaagcctgtttcatcatttgtcaacgcttaacttttttaacaaattgagaaattttttctgttttggcccgctgttttcttctctttaaaaacatccaaagaatgagaagcaacacaatgaatataccgagcggcagcatatattgatcgagaatggaaccgacgcttttccaattttccccgagtttcattccgaggtatacgtaagcaaatgtaatcggcagcatcgctgcatatgtatatagagagaacacccagacattcatcttcgcaatgccgcacggcaaagaaatcagcgtcctgacccccggtataaaacggccgctgaacgcgaccaaacctccgtgcttctgaaagaaatcatctgatttctgcagggattcgggttttatccatatatactttccatatttcagcaaaaacggccgaccgcccagcctgccgattccatataagacaagcggacctgaaacaccgccgagcgaaccggcaaacacggtcccggcaagtgtcatatccccttttgagacccaatagcccgctagcggaagaacaatttccgccgggatgaattctatactgagcgccaaaaaaatcccggcgtaagataagcttttaaacgcctctattattgatatgatgaattcttcgatgatctatcactcccggcttacgtctatattccgaaacttaagaatgattttaacacaaaaccttgaggctgaaatatcttttagacatgcccgttataaatgtgagtcgtttcagatcggtatagcgggagggaatgacatgcgcaatacaacgtcccgcctgtctcctgattgcttgtctggcggcgtttacatcacttaagatctccggaaaagtaagcggcggctgaccgcggattcagttcatatgggagctggaaattttctcagtcaccacatgggaatgcgtgggcatttcccggggaatgattttgtataatctttttgattaccgctgatgattttcagggacttcagcgctttaaagaacttaccgattcactgattgtaaataaagaattcatttgcttttcagccgaccatttccgcctgaggaaatggaacagccgctccatgaagcgccgcaacacccataagttgctacacatggaacggacccgtttatccacaataaagacaaaaaggagtttttattcatgcacacgatgtggaagggttcgatcagtttcggcctcgtcaatatcccggtcaagctctttgcggccactgaagataaagatataaaattccgcagtcttcataaagaagaccatgcgccgattaaatacgaaaaaatctgcaccggatgtgaaaaaagtctggagcctgatgaaatcgtgaaaggctatgagtatgtaaaagggaaatacgtcattatgacagacgaagacttgaaagacgtaaaacaggaacatgaagaaaaagcggttgagattgttgactttgtccagctgcaggaaattgatccgatttattttaaccggtcatattatgtcgggccgggagataacggcacaaaagcctatacacttctgcgggaagcgctgaggacgacgggtaaaatcgggattgcctccattacgatccgctctaaacagcagcttgcgattcttcgcgtgtatgacaactgcatcgtgatggaatccattcattatccggatgaagtcagaaatgccggacatgtgccgggtgttcccgagcagacagccgttaatgaaaaagagctgcagacggcgattacgttaattaatgagctgacaaccgagtttgacccggaacaatacgaagatacgtaccggaaagcccttctcgctaaaattaacgataagctcgaacatgaggaagcgggcgtgacaccggctgctgccggcccgcgcgaagatgtcatcgatcttgtcagcgcgcttcaggcaagcattgaccggacgaagcggccggatcgcgaacaggctgcgccggcgcggacaaaagacgccgcgtcagcaggcggcggaggcaaaaagcagaaaacgaccagacaaaaagccggaacgtcttaatcatggtgctgacgatgcagccgattttgacctctgtaccgcctgaaggcagtgagtggcgctatgaggtaaagtatgacgggttccgctgtcttctccgcatagacgaaagcggcgtgacattaaccagcagaaacggccagacgctgacgagtcaatttccggaaatcacagcttttgcggctcggtgttttcagcacatgaaagacaggttccccattacgcttgacggagagcttgtctatttaatcaatccgtacagagcggactttgagcatcttcaaatccgcggacgtttaaaacggacggaagcaattgaaagcaacgctgatagacggccgtgccgctttctggcatttgatctcctcgttctggaaggcgccggcaccgtctcattaccgtatgtgaaacggaagcgcgccctttccaaactgtttaaagaagcaaatcttcccgcctgccctcatcacttagcggaagaagcgattcaatacattccggaacacactgactttgatgcgctttgggacaaggtcgtccgccatgacggagaaggtatcgtagcaaaaagggcttccagcggctgggcggaaaataaacgctcccccgactggcaaaagtataaacatatgaaaacggcacatgtgctattaaccgggtttaatccgaagaacgggtatgtaacggcctctgttttaaaagacggcatcgccgtcccgatcgcgtccgtttcccacggcatgcaggcggaagaaaaaaacgccgtcagaaccattatggagacccacggaaaaaaacaaaaaagcggcgagtatacacttgagccttctatctgcatgaccgtgcagtatttaaccatattgcaggacacgctgcgtgaagtatcttttgtgtcttttcagtttgaaatggattggacggaatgcacgtatcaacagcttatccttcactctaaaacgctgccgccgaagctgcagttcacaagtctggataagattgtttttaaaaaacgtgaaaaaacgaaagcagatttccttagttatatggtgaaaatgagcgattttctgatgccctttcttaaagatcgtgccgtcacggtgatccgttatccgcacggcgcgcctggcgaatctttttttcaaaaaaacaaaccggactacacgccggactttgtctcaagcgtgtttgacgggagccacgagcacatcgtatgcagcagcataccgtcacttttatggctggctaatcagctggcgcttgaatttcacgttccgtttcagacagtgcattctgaaaggcccgcagagattgtcattgatcttgatcctccgtcaaggaatgattttcctatggcagtggaggctgcgcatgtgctgaaacagctgtttgactcattcagcattacgtcattcccgaagctctccggaaataaaggcattcagctctacatcccgctttcaccggaagcattcacctatgaagaaacccgtgcgttcacaatgctcgtcgccgattattgcgtcaggacgcggccggatctttttacgacagagcggtttatcaaaaaccgaaacggcagactctacctagattatttgcagcatgccgaagggaaaaccattatcgccccctattcgacccggggcaacgaattgggaacggttgcggctcccctttattggagcgaagtcaactcctctttaacacctgatgattatacgatcgatacagtagtgaaccgcgtcaggacagagggagatccgttttatgatttttaccggaacccgcaggacggcccgctttcaatcgtgcttgagcaaatcaagagaaagagctgacgctttttgtcagctcttttcagtctgatacgtgcacatcaatttttctttggaaataaataaatagcaggagtaaggaatgtttttgagggtgagctgttttgcagtaaagtataaaatgggaatatgggccgctttcttaaacagcctgtagcagccgctggacggttttatcacatcaaaaccgagtctcgcagctcctttatgaagcattgtaatgccgacgactcccttaatctcgtctttccgtttatgctggttaatataatccgctaaatgaggcatggattgatataccttctgatatagcataatcccccttctgaccgcgctttcaataggctgcagctctttcaggagtttgacattatgaagatgaatcttaactaacacgtcgttttttttaattctggttccgtcgctcaggatgacatcttttcctttatatctagtcaaacggacgcggaatacattcgattgccgtttatcaatcagcgtcagccgggtaaagaagaaataaagcggatcaagtaagtaccatatagacagcagacagcttctcacatgttcaccttctttataatcaaagcaccctcatattttggcatggggcgtgtcacattatgattggtaaataatgatgccgacctgtatcagcttatgcaaaaaccgcttcaggctctactgtccggaacagaaaaaaaacactcttcgtgaagaagagtgtctgtatccgctttcttttaacggaaaagcaaatgctggctgtgaattcccgcttttttcagtaaggctatcagctgttcctgttcctcaggcataagtcctgaaaacgctctcgcaattctcaatgaatgaatcggataaattttatccaaatactcgtttcctttatcagttaaatgggcgtaaacagaccgtttgtccttcgggtcttgttctctgaccaaaaacccgtttctttcaagcttgtcgatgacataggtgacattcccgctgacaagcaaaagacgcgacccgatttgctgaagcttttgcggtcctctcgtataaagcagctccaaaacggcaaattcagtcggattaaaaccgtgttctttactgtcgcggatgctgtgttcagacacactcttgaaagcccttgcaaaaactttgtacaaattcatcgaacgcatcacttcttcttcgttaaatgataatctcatcatatctaccccgtatttaagatttttataaaaaaataatgtaaacccttacaattcataagagtcgatctttgttttatattctattcgtgccgtttttcagaattccttcttttttatataaaaaaatacccttatacatcatttaatttgtataagggttccgttctttatagggaatgttccgaaaaaaatacgcgtattcctttctcagctccgtaattgtcatggaattgagtatttctttcgtatagactccgatctgcagaagctttttggaataatggtttctctctttgtccaatgcattttgaagcaaacgactcatggcggcctcctttgttttccgttattctatgatcagaataacgcttttatatcaaagacgtataaagccattgtaaaacttctgtagattatgatgtttttcggtaaagtccgttctggacggctctgagcagcggaaaagcatgttctccggcaagctgcatgaacgcctccagcatttcgtcgcgtttcatatctaattcaatgatttcttttgccagcgaaaccgctttttctttctccattcctatccttcctcctcattgtgtctgtatagtacagcataaaacggggcacaggaccatgcattaaccttgtcaatttttctgccgctttttttctaaaattttctattccgcgtcagaaaacctgacaagcgtcaggttttttctctttttttcttatataatatgagtaaaagacatccaggggtgggaaaatgacgacagacgaacaatcttacaaagataaaaaagtaatctcgatcggcattgtaagcgaattaaccggattgtcagtcagacagatcagatactatgaagaacggaaattaatttatccgcagcgttcatcacggggaacgagaaagtattccttcgcggacgttgagcggctgatggatattgccaacaagcgggaagacggcgtgcagacggctgagattttaaaagacatgcgaaaaaaagaacaggctctcaaaaacgacccgcagctccgcaaaaaaatgctggaaggacagcttaatgctcattttaagtataaaaatcgctgatcaaaaaagtccgcctcctgtgagacggactttttttataaagcatgaagaaatgcagttgcaatgccgaaataaattaataaggacaaaatatcgttcagcgtcgtaatcagcgggcctgatgcaatcgccgggtcaatgttcaatttatgaagaataatagggacgatcgttccggccatcgtaccgataatcaacgttgcaagcagcgatgaaccgacgacaaaaccgagcgttaagtctttctgccagacggttgcgacaatcgtaatcgcgatcgcacagacgatgccgatatagataccggttcttaattcacggaaaatcagtttaaagatgttttttttattcatttcttctttagccagtcctctgatgacgacggcgagtgactgtgtgcctgtattacccgtcgttcccgcaatcatcggcatgaaaaatgcgagggcgacgactttttgcaatgtatcttcaaaataattcagaatgcttccggaaatcaatccgataaacaatagcagaatgagccacggcaaacggcggtacgccgcaacgtacgctttcgtatcaaatgtaatcgccttaccggaggctgcgaatttttcgtaatcttcatcggcttctttaatcacgacgtcaataatatcatcgacagtgacaataccgacaagcacatgattttcttccacgatcggaatggctaaaaagtcataccgctggatcagccgggcgacttcttcctggtcttggagcaccccggccgagatgacacgtgtaaacatgagatcctgcactttatcctcaggctcgccgagaattaaatctctgtaagaaagcactccgacaagctgcttgctgtcattaatcacgtacaaataatttattgattctgcgatttctgcaaagcttttcagcttcacaaccgcatcttttactgtataatgctgcggaatccagacgaagcggttcgtcatcatccggcccgccgattcttgcggatagttcatcaaaagctgtacggcctttgattcctcagcctccatgctggataatagctgttctttcagttcttcatccatctcttccagcaatgcggcgagatcgtcgttatccattttattcattgcgagagtggctttcgttttaccgactttatgcaaaacggcaagctgaaattcccgctccagctctccgatcatgtcggtgatgtcatcaaccgtcatatatgacagatagcgggcccggtgcttttccggcatttctttaaacaaaaatgccatgtcatagggctgaagctcatctatcatgtttcggaattcttttatttttccgtcccgcaataaaatgataatgcgtaatatgagttcgtcataggtcatgttttggaccatcgggactcgtacctcctttacggagacgcgccgtccgtcaagggaagtgcggcggtttgtctcctcatcatgtcgtcactggttatctggctgtatatgggtacttcttctgacatactcgaatggggagaatccatactccgcacctccttatcatgctcagtcgtgtacgttttgaggcataaaaaaaaccttctgatatgaaggcgaaaacaagcacggcaaataaacgtgcggggcctccaatcgtagagctttagcactgtatggcataggacagccatccagctgcgttaagaatcaccttatgtcgatgattcctgttgacccattggcgtctttggacatttttgggcagcagcgtatctccatacaggagcctcacctaacgaagttcttatttgagttgacacactgagattacagaaaaaaaaggaatgtgtcaaccttaaatttgtgatttcagcacatgcctataaaataaacggaataaaggcataaagcccttattccggcaaatcgctttcatcctcttctgaaaggaaatgataggattcatgcagcatgagcgcgtactccccttcttttgtcggatgcggtacatactcagcctcgttgatatactgctcttcccttttcttcatatgacagacctcctgttcaattttagattgtccaaaagaagacccgttatcataggaaaaaaatcacttgcggagcgggacaagcagctatatttttcggatcgtgaaaaagttcctaagcagccacgggcccggtttgaaaccgagcgttaattgccacgcgccgatcgcctgcagtccgaactcccgaacgagaaccattttttcactcatgctccgcacatcctcaaaccacacttcatgcgttcttccattttcatcagtataccggaagtaaggggaacgctcctgctgggaataacggatcactgattgatgcttcatggccgtttccatggcgcgctgattggagatggcggatccgatcgttcccggacggtacggaatcacccaatcatacccgtacagcggaacaccgagaatcacttttcttctcggcaccctgctgatggcaaaattgatcgtttgcctgacctctgtcaaaggcgccacgggtcccggctcactgccggcgtggtgccagtcgtacgccataatgaacatataatcgacgacggctccgattccgccgtaatcatatcccctcagccacggcactgcatcacttgtttttgccggaaccgatatcgttaacgcgagctgatgctccgaaagccgggtttttaactgccggagaaatcctgtgaagaggtccctgtcagcttctctgatccgttcaaaatcgatatttacaccgccgtatccctttcttacggttaaggagacgatattgttgacgagattcgttcttgccgtcggattttgcagcacttgatgggctaattccggactgaatcccccttctgtcagattcgtaatgacggcaagcgggcgcactctgttctgccatgtggtttctattgcggttctgtcgtttaaatcgttaatgatatctccattcgggccaaaatgatattcaaacaaagaaatcgccgaagaatacggcgcaaaatcattaattagctctctatccgcttcaggcgtccgaatgacataaaattgcagggttcccgcaagatagttagagatatcagggatcttcactttcatacccgcccgcagccggttcggcggaatatccgggtttgcctgcatcagctgcatctgcggcacataagccttacctgcgataacggcatacgtatcattcggctgaaccgtatattcattaagagggattaaaagcgcctgccccggaacgatattcgtttcctcaagcccgttgacacttctgatgctgtcaacagggaatccgtactttctgctgatggaaaataacgagtcaccagactgcactgtatgaacaaacatagatgtcctccgtttccttttgatcaaaagggctcttcttatctttatgaatgatcatccggtccgattccaaactctgttcggagaaaggctgtttacaaatcagacatgatcaactatgatgatgtcatcataaaaaactgtataggaaacgcactaggggtgctgttatcggctgagataaaacatgcggcaggcgtgttttgatcccttataacccgatctggataataccagcgtggggaagtgcagattgaccggagcgcaggttttttccccatgcgttttcgttctgctgctgcatattccctcggatatgcagttttttatttttcattaaaaaacgggggaggacaccgcaatatgaaactgaatataaaccgcctgtaaaatcatctctttcatacataccactatccgataagaaagcaggagatcacaatgaaaaattggaaaatgagagaaattgtcgtcatgtccgtcatcagtgttgtatttgctgtcatttatttagtatcaactcatgcaagcaatatagcggcagggtttttcggccggatgagctacgaaccgatttacggtatctggtttatcgtctcggtgattgccgcgtacattattcaaaaaccgggagcggctctcgtttctgaaatcatcgccgcgtttgtggagtgcttactcggaaatccgtcaggaccgatggtgattctgatcgggatcgcacagggaatcggtgcggaagcggtctttttagcgacacgctggcgggtgtataccctgcccgtgcttcttttatccggtatggggtcttctgtgacgagcttcatttatgacttgttcgtttccggatactctgttttgaatccgggtttattagccgtcatgcttctcatccgtctggtctcaggtgcgcttcttgccggccttctcggcaaagcaatcagtgatgcgctggcttacacaggagtgctgaacggcatggcgctcggaaaacaattcaagaagaaaaagaaacaggtgaaccaagatgcaggcatctgagccccttctatcggccggccgtcttaccttttcttatgatcaggatgaaaagccgattcttcaaaacgtgtcctttcagctccggaaaggagagagggctttattgctcgggccgagcggatgcggcaaaagctcgctcgctctctgtttaaacggtctgtacccggaagcatgcgatggggttcaatcgggaactgtttctttatacggaacacctctttcacatctgacagagcccgccgccagatccatcggcgtcgtgtttcaagatccggaccagcagttttgcatgctgacggttgaagatgaaatcgccttcggcctggaaaatttgcaatatacaaaagaagatatggacgcaatcatcgatgacgttttagaaaaattagagatcactcatctgaaaacgcgaacgatcgcttcgctgtcaggcggttcaaaacaaaaagtggcgcttgcctgtatcattgcgatggaaccggaactcattattttggacgaaccgacggcacagcttgatccatattccgcacgtgaattagtgcggctgatcaaagatcttcaagcaaaaaaaggcttcggccttctcgttatcgaacatcagcttgatcattgggcgccgtggatggacaggacgattgtccttgacgaaacgggtcagaaggtgatggacggagagacggacgttatctttgaaacaaagattgaagagctgatagagctcggcattccgattccgcgtgtgatctcattgcaggagcacgtcagcattccttttacattgtgtaaagaaaagctgtttcaagaatctgtaccgtctctgcccgaaccccggcccgccgcgctttcggcagaagacgcgctgagcgttcacgagctgtcattctcaagaggggcagacgtcatttttcaggatgtgagcttttccgtaaaaaaaggttcaatcaccgcgattgccggccctaacggaacaggaaaatccacgctcctttctgccgcggccaagctcatccgtccgctgggcggagacatcaaaatagacggcagaccgattgattcctattctgaaaaagagctgcggcggctgatcggatatgttttccaaaatcctgaacaccagtttgtcacagattccgtcattcaagagctgatgttcggttttgaaagcagcagagccgcaaaggagaaagctcttcagctgttaacccgattcggcctgagacgccatgcctcacagcatccgttttctttaagccaaggacaaaaacgccggctcagcgtcgcaacgatgcttatgcacaatgtgaacgttttgatgcttgatgaaccgactttcggacaggatgccaaaacggcgcgggagtgtatgcaaatgctccgtgagattcaaaaggaaggaacggctgttttgatggtgacacacgatatggaactcgtctcagattatgccgacacgatccttgtgctctgcggcacgaaactggtattccggggaactcccgacgctttattttctgataacaccgggatcgccgagcaggcgcatttggctttgccgctgcggtatgaatggatgaaacacgacaggaggcggagaaatgaacttgcggctggaggctgttaacccgtcaataaaggcggcggctgtattgttatgcgtcattatgctgtcgtttatttataatccgtacacccctgctttgttttatatcatcattgcgggaggcgtcctctcggcggggcgtgtgccgctgaaaaaatggctgctgttcacgattccgtttgtcattctggccttcggttctttatggacagccgcggtattcggaaacgtcccgacaaccggaagcaatctgctgtttaagctcgggccgattgccgtcaacagtgataacgcggcgctcgggatttctatcgcgtttcgtattttatgtttttccgctttgtcgatgatgtttcttttcacaaccgatccgattctgttcatgctcagtctgattcagcagtgtaagctgccgcccaagcttgcatacggcgttatcgcggggttccggtttctccctcttctgaaagatgaaatcctgatcatccggcaggcgcacagaatcaggggcgcggggtctgattccgggctgaaaggaaagctctccgccttcaggcgcttcaccattccgctattggcaggcgcaatcagaaaggcggaacgcacggcgatcgcgatggaatctaaaggctttacggggagccgaaaccgcacgttttacagaactgttaccgtgcgccgcgccgactggtgctttttcctgctcgtgcttctgttattcggcgcaagctggctcatttcattgttgtttgtataaaaacaggccgccggagtgattcggcagcctgttttgttatgtatgttattgatgataattgagagcctgagcgagattggacttgaccgtaatatctgagaaattaatgccgagctgtacggcggtttgagcgatttccggtctgattccggataaagtggacgtgacgccgatcaatttcagcgcctcaattaatttaaaaatctgatgcgccaccatcgtatcgacaaccactacacccgacaggtcaattaacagatgttcaatcagccgttttgcacatgtgctcagcgtattttcaagaatgaatttggcgcgctccgtgtcaatatcgccgacaagcggcagcagcgccgtccgtttgctcagcgtgataaccggcgagcttaactccaaaatcatttctctttgcgcattcagctgcatttttgagttatgctcggcatgatcgacaaacgtgtaaatcgtaaaatcaaatacttgtacaattaaattctcccatttctttctttccccctgtgcaaacgaagattcatgtttatcggcaaacgcattataataactgacgtatagtctccggtttctcatgaattcacggaccacatactggacgggagtatccagatgcttctggtctttcgcaagctcaatcacccaccgctcgaactcttctaaaaattctttttccggcatgatatacattttattaatatgccggtaaaattctttatcctgctccgtcagttcttctgtgatgacgggatttgtcaaagaataaatcgaattcggatccgaatcttccatcgtttcgatccactctttcgcaatttgatccacttgttctgaaaaatagctgtataatgcttcacttatcttcatatctcttctcctttcccatttccaattatagcgtcagcggatcatgaatgaaaataaaagctgttaaactatccatttatttgaaattttttagtgcgatagattacgccttttttatgaaaatgcttcaaatgactctttccggccggcatgctctgccataaaatagtagcaacacccttgtatccactcgcaagcataaaaaaggagggcttttttatgaatggtgaaatgcatttgattccttatgtcacggatgaacagatcatggaggtgaacgagcttccagagggtattaaagtgattaaggcgccagagttgtgggcaaaagggtttaaaggcaaggatattaaaatcgcggtgcttgacacaggctgcgacatcaatcatcctgatttgaaagaccggattgtcggcgggaaaaacttcaccgatgatgacgaaggcaaagaagacgcgatttccgattataacggacacgggacacacgtttccggaacgattgccgccaatgattcaaacggcggaatttcgggtgtcgcgccggaagcaagccttttaatcgttaaagttctcggcggtcaaaacggcagcggcaaatacgaatggatcattaacggcatcaactacgccgttgaacaaaaggccgatatcatttccatgtcactcggcgggccaagcgatgtgccagaattgaaagaagccgtcgcaaatgcggtaaaaagcggtgttctggtcgtttgcgcggcaggaaacgaaggcgacggagacgagcgtacagaggaactgtcgtatccggccgcttacaacgaagtgatcgcagtcggatcagtctcaatcgcccgtaaatcgtctgaattttcaaacgccaacaaagagattgacctggtggctccgggagaaaatattctctccacccttcccaaccataaatacgggaagctgacgggcacttcaatggccgccccgcatgtgagcggagcgcttgccttaataaaagggcttgaacaggacgcgtttcagcggacgctttctgagactgaagtctacgcccagctcgtgcggcggacccttcctttggacatcgccaaaacattggccgggaacggattcctgtatttagacgcgcctgaagtgctgatggaaagagccgaacaggcacagctgctgtctttctgatatttttctcatataatgattgatcagcttgtcacatcactaatttttaaaatgtgagattttctattgacagtgatctgaataagctgataagataaccaacaaatgatgtaacttttcaaaaaaattgaaatattttctcttatcgagagttgggcgagggattggccttttgaccccaacagcaaccgaccgtaattccattgtgaaatggggcgcgtgatttttgcgccgagacgaatgtctcataaggcacggtgctaattccatcagacgtgatctgagagataagagaggcttgcattttgaagttaaagcctctttctctcatgagaaagaggcttttttgttacatctcacttaaaggaggaaacttaatgacaacaatcaaaacttcgaacctcggttttccgagaatcggcttgaacagagaatggaaaaaagcgcttgaggcttattggaaaggtaaaactgataaagaaacgtttcttaaagagcttgacggtttattcttatcagctgtcaaaacacagcttgaccaacatatcgatatcgtgccggtctctgattttacccattatgaccatgtgcttgatacagccgtcagctttaactggattccgaaaagattccgcagcatcacggatcccgttgatacatactttgcgattgcccgcggtgtaaaagacgccgtttccagtgaaatgacgaaatggtttaataccaactaccattacatcgtccctgaatatgacgaaagcattgaattccgtctgacgagaaacaaacagcttgacgactaccgccggatcaaagaagaattcggagcggaaacaaaacctgtcatcgtcggtccgtatacatttgtcacgcttgcgaaaggatacgaagaatcagaagcgaaagcgattcaaaaacgccttgttcctctttatgtgcagctgctgaaagaacttgaagctgaaggcgtaaaatgggttcagatcgatgagccggcccttgtgacagcttcttctgaagacgtccgtgccgccaaagacctctatgaagcgatcacaaaagagctttcaggactgaatgttctcctgcagacatactttgattcggttgatgcatatgaagaactcgtttcttatcccgtacagggaatcgggcttgacttcgtgcatgataaaggcagaaaccttgagcagctgaagaagcacggcttcccgaaagataaagtgctggcagccggtgtggtcgacggccgcaacatttggaaaatcgatgttgaagaacgcctggatgcggctttggatatcctcagccacgctgatgttgaggagttatggattcagccttcaagcagccttctgcacgtgccggtggcgaaacaccctgacgagcatcttgaaaaggatttgctgaacggcctgtcatacgctaaagaaaaactggcggaactcggcgtcttaaaagaagggcttctgtccggcaaagcagccgtcagtgagcagatcgaagaatcaaaagcggcacttaaggctttaaaagcattcgcaacaggagcgaactcagctcaaaaagaagagctgaatcagctgacggaaaaagatttctcccgtccggcaagctttgaagaacgattggcgctgcagaatgaatcactcggtcttccccttctgccgacgacgacaatcggaagcttccctcaatctgcagaggtgcggagcgcacggcaaaaatggcggaaaaaagattggacggatgaacagtaccaagcctttattaatgcggaaacgaagcgctgggttgacattcaggaagaaatcggcttagacgtgctcgttcacggagaattcgagcggacggacatggtcgaatacttcggtgaaaaactggccggattcgcctttacgaaatatgcatgggtgcagtcttacggttcacgctgcgtacgtccgcctgtcattttcggagatgtcgaatttatcgaaccgatgacggtaaaagatacggtctacgcccaatcgctgacggaaaaacacatgaaaggcatgctgacgggacctgtcactatcttaaactggtcattcccgcgtgtggatatttcaagaaaagaaatcgccttccagatcgggcttgccctcagaaaagaagtaaaagcgcttgaagatgccggtattcagattatccaggtagatgaacccgcgctccgcgaaggactgccgttaaaaacgcaggattgggatgaatatttaacttgggccgcagaagcattccggttaacgacgtcttctgtgcaaaatgagacgcagattcatacgcatatgtgttacagcaactttgaagatatcgtagatacgatcaatgatcttgacgcggatgtcattacaatcgaacacagcagaagccacggaggatttttagaatacttgaaagaacatccttacgtgaaaggcctcggactcggtgtttacgacattcacagcccgcgtgtgccggcaactgaagaaatctatcaaattattgatgacgcgcttgaagtgtgtccgactgaccgcttctgggtaaacccggactgcggactgaaaacaagacagcaggaagaaaccgttgcggcattaaaaaatatggtcgacgccgcgaaacaggcacgaaaaaaacaagctcagcttgtataaaaaaagaacagccatccgcaaatcgcgggtggctgttttttctgggcgtgctatttattcttcagcgccttcgcaagttcacttagtgaatcatgctgcttaatttgatagccccgcccttctttttgcaaataccctttttggcagaattgcgtcagcacatgcaagagatgacggtaagatacacccaaataatcacagaccgttacgtgcttctctttataaaccccttcataagccgtctgcaaaataaaatcagccagccggtattcaagcgggaacgccagactttgtgaatatttcgaagccataagcgtcgccttagcacttagaaacttagccaactcacgcaggaatttcgcatcctgcagcaattgcgcgcggcagcggtaaataggcagagcaaaacaaacagtcttcgctgaggcttgaattccttttgtgtaatacacttcatgtaatagttccatctctccgatgtaatcatttttgttgataaaattaattaaagaaactttcccgttttgatgggttacatatattttcgcttttccttcaatcacgtaaaacaggaagtcagcctcctgccctcttgaataatccattcgtcccgctcatattcgcgcacttccataaactcttcagcggggaaagagaataaatgcgcgattgagtgtttttttaactgatgccgctttttctcgcctttataaatttccatcgtccaccccaaaaatatgagatatctcatattgtctttatgtctttacatgataacatgccaattaaaggaggaacgggaatgaaagcatatcgctggatgagtctgcatttttttagtttctttatgacatggggtgtttttctgccctattggacgggatggatggtgcatataaaaggggtttccgtatccgaagccagttttattatgagcctgggcttggcggcaagagggatttccacattatttttctttccttatttatcaggaaaattcagcagcaaagccttattaaacggcgccagaatcgggacgtttctcgcacttttatgttatattcccgctgattcttttcaaagcctgcttcttgtcacattagtgctgcatgtgttttatcctgctttaatgcctgctttagacagcgcttgcggcgtccttgtacagcataacgaattaaaggcctatgggacaagccggcagtgggggtccgcgggttttgtttcagccggcgtcatcctgtccgtctttacaggtatattcggagatcaagcgattttatgggcactgcttttaggcaccctgatattcgcatgcctcagctttatgcatgcgccagctgttctttcaaaacggccggaaacagacagcgcaagaaaagagggcatgtttgccttattccgcatcaaatatttcggtctggtgctcgcaatcgttatcttactgcaggcggcacatgcgtcttattacaattacggttatctctttttgcaggaaatcgatgcccccgcatatgccatcggaatcatcatcaacatcgccgttatcgcggagattatcttctttgcaatcgctgaccgatactttcatcaatttacggcaggctctttgctcgcgttggcggcgcttggtgctaccgtacgctggatactcgtatttgcctttccgcatgtcatcattttctgtattgcgcagacgctgcatgcctgttcattcgcgatgggacactatgcatttatgaaatacttaattaaaaatatttcacccgcgcaaatcccgaaagcccaaggcatatattcagcgcttgctctcagctggagcactgcggtatttactattttcggaggttttttatatgaaattgaaccccggtatgcctttatcggaatgattgtttgtacgatcccatccatgcttctcgcccttttatacagaaaacttgaaatgaaaaagagagtttttgcaggaaacgcacaagatatatagccatcgctttatagacgatcacatgtcccgctgtcattttgaccgatttgcgaatgctgtgcgatgtattttctctatatttaaagtatttccttcatatatgatgaaatcaaaaacagcggtataacccgctcaattggtttataaagggaatccattcagaaacttggacagaatccgtgaatatactgatacagtactgcttacgctcatttcggggaactttgttcgtaataaaatgattttcagccaactcataaggagggacattgtgtcacagcctaatttgcccaatatcacccctgtcgttacactttccagagacgataccattaaccttcttctttcgtcaattgctatggaagagctgggaatggcacatattctgaatgcggaaggtgaaaaaatccaatacgcgctcggagcgattcccggattaacagggcccccgtcaagtcttgcggatattcttaacctgaatgagagcgtccgggatacgcttgacagcttaatgaaacaggagcttcttctcggttcaaaattggacagtatctcaaatatccctacactggcggggccgacgggaccgacgggagcaatcggacctacgggggtcaccggtgcgggccttcaagggattgttgcttttaatccgctgattgcccccacttacacaaccggacaggttgtcttgtataacggaagctcttacgtcgcaaacgtaaacagcccggcgggaacccctggagcctcagctgactatacacttttagctgcggcgggaatcaccggcgctactggcggtaccggcccgaccggaagcaccggcgttactggcggcaccggcccgaccggaagcaccggaacaagtctgacagcaacttccggctatgcgagcaatacgggcggcggtgttgtcgcagttattgtcggcggcacgaccatttccttaccgaatgaacaaaacctttcggcagatattacggctaatgccgcaaataccatatttaccgttgctccggcgggacggtactatatttcctaccatattaatttaacggccggcttgcttgtaagttcgcgtattttaatcaacggcactcctcctgcaagttcgattatcgccccggtcgcgtctttggcaaactttaataactcctttattgtgactttgccagcaggcagcaccatccagcttcagctgttcggattattgggtgcggccacattgcttggaggaagcgtcggtgcagctttaaacattattcgattatcttaatggaacatgcaaaaaaaggatcaggcgtttgtccgctgatccttttttaattgagacagaagttctttcgcgggtttaaattgaggattgaacttcacggattttttggcgtaagcgatggccgtcatatcatggtttaatgcagcatggcatttcgccatataataaaaggctctgaaatcggcggcaccttttaaaatgaagtgatcagcgttttctccttcaacctgcgttccgttatcaaatgctttgattgccgctctgtacttttccaaatgatataatacaaggcctttataataatgaagattgctgtaatcaggatatagcttgagcactttttcaatcccttgttcggcttcttcataccgtttgagctcaagcaatattgtatatttcaaataatacaggagagacggaggcattcgtttttcgcttaaaaattgaaaaattgagccgttgacaagatgtaatgctttttcatagtctttgattctgtagcattcacttgccaaatgatagacaagccacggatcaggattttcctctgaaagctcttcatttaaaatgctgatattccgtttatgtttttgcttgatcttttcttcctgctccaagtagccgtagtgatgaatcacacatgggagcgtgaaaaaagcattgttttcttcctcattggaagccgagatattctcgtgaattctgccttgatacagaaggcctttatgattgcggaacagtctcggctgcatgctttcaaacgcttcgttttcatcgagctgcttccccgtataattgatgattttcaaaaggccccggctcggtaatccgtcatgaagcagcgaagttaaaaaacggcccgtctcctgatcgagctcttcatccgcgtcaagcactaaaatccaatctccttcggcatgctgcagggcgtaatttctggcctttgcgaaatcattctcccattcgaaatcaaacactcttgcctgaaagcttttgcatatatcttttgtattatcttgtgatccggtgtctgcgatgacgatctcatcaacgatgtcttgtacacttgataaacaacgggagatgtatctctcctcgtttttcacaatcatgcaaagagtcagtttacattcagcatttccgctcattttctcacctttcccgattttggagttgttgattgaaccaaggccgttcaggagtgccgttcatcgtgatgatgacaggccgcacccatctgacggcaggttcggcagtttccgtattccattcctgaagctgcctgacagcccgcttcgtaatcggatgcgcccggaattcgcgcgggctgtcagaaatgaattttttcgttcgttccgtaactgtcttcatttcaagaaagtgccgctcatacatctgcttctgctcttcttccaagctgatcattaaaaacagacggccgcctgtttccatctgccagcggcacaaagcggagaacagcctgatttcttctttgtaatttgaaccccttcttttatccacggtcacagataatatatgtaacagcgcaatcgtgagacaatgcatggcttcaaaagatgcctgtttcgcttttgagatgcttgaatacggcatatgcttcacccgtctctttttttatgaacgctccccgccttttttcttccaaccgcagtcctcacaatccccgcactcacagcagccaatgcgcccgtaaaacaggccgtcacacggatcttccggatcactgggatcgtctggattccacgggtcatcaggatcgcccggatcactcggattacttgggtcgtccggattccacgggtcatcaggatcgtctggatcactcggattacttgggtcgtccggattccacgggtcatcaggatcgcccggttcactcggattgctcgggtcgtccggatccatacagacttcagaatcctgtaagaagataatgtcctcaagcttcgtctgcaaaaggagttgtgatttcatgacggtgcgcaggagccgttcagtgcttctattgattgatgacaattcctccaaggagggatcgccggaagcgccgagaaacatttgaatcctttccgcttccgcctgcagaatatgggatagtccgatttcttccatagccacggatgaaagaaggaggttcagggtctcacatctggagagtgtaatgtcgggggtgatgttcggtatgtttggaagagacatcgatttctccctcttttctcttggtgtcattatgcaaaagtgctatatcgtattcttattccgggagagaagagatcattactgatgttttcgttaataaaatatcccggatataaaatccgggatattcgttcggttatttattttaattcaagtttgacgtctacatttcctcttgttgcttttgaatacggacagaactcgtgagcggcgtgcacaagcttctccgccgtttctttgtcaagatcttttgtatcaatgacgagcgttacgccgattttgtaacctccgtcactctcatcttttaaaaggctgacctgtccttcaatttcagaggtcatgtcgattttttgtttttgggcggcgagctcaagcgctcccccgaagcaggcagcatatcctgccgcaaagagctgttcagggtttgtgccggtttctccgtctttttttgcattcggcatgatgatgtcaaaatccagcaccccgtcttcggatttaatatgtcctgctcgtccgccgactgcggtcgcttttgcagtaaataatgccattattatcagcctcctcattgtacttactgtatatattgcccctgctcatatttttaaacatgattggaataggaaatgggccgtttttcggctacaataggggtaacgttaacaaacaaagagttggtgaaagaagtaatggcagaaaaagattttgaacatatgaaactggagaatcagctttgttttttgctgtacgcaagctcaagggaaatgacgaaacggtacaaaccgctgcttgataagctcaacgtaacttatccccaatatttggcgctgcttttattatgggagcacgaagaactgaatgtgaaacggatgggtgagcttttgtacctggattccggaacgctgacaccgatgctgaaacggatggagcagcacggaatcatcatgagaaagcggtcggctgaagacgagcgatccgtgacgatcaggctcacagatgaaggacgggccttgcagaaaacagcggcggatatccccattgccatgctggaacagacgggacggtcaaaagaggaattaaagcagttaaagcagtcgctttatgaggttttgaatacgctgcacggcaaaaaataaggatgccccgaatgggcatccttatttttattctgctgccagaagcttcacttcaatatttcccgctgtcgcttttgaatacggacagacaccgtgcgctttttggataagggcttcaagctcctgtttatcaatgccggatgctttgacctcaagcgtaacgcctagtttatatccttggtctgcttcatctttcagcagactgacatgcgcagtgacctctgtttcaatactcagacgctcttttctcgctacgagctgaagagcgctgtcaaagcaggctgaatatcctgcggcaaacagctgttcagggtttgtagcatgttcgagcttttttgctcttggcgttcccggcatggcaacatcaagattcagcactccgtcagaagacgtgactttcccttcacgtccgccggcggctgatacggttgcagtaaataatggttttgtcatgtgaattcacctctattatattgcgtacaatttaattttacacaatataatagagaccgtcaatctttccgcataaaaaaagcctaccctttttgaaggataagcttaaaagattatacgcggatttgtccgtttcctttgatgatgatttttgtagatgttaacgccggaagccccatcggccctctcgcgtgaagcttttgcgtgctgatgccgatttcggctccgtatccgaattcaaaaccgtccgtaaaccgggttgaagcattatgatacacggcggcggcgtcaacggcggtctggaagtaagccgcatgctcggcgttctccgtcagaatggcttctgaatggtttgtgccgtactgctgaatgtggcggaccgcctcctgtacgtcctgcaccgttttcacactgagaatcggcgccaggtactccgctccccaatcggcttcttctgcttgtttcgcttgaggctccagtccgcaaatcacctggtctcctcggagctccacccctttttctgtcagctgattcagcagctttcgtccgtgttcttcggcccatttttcatgaatcaaaagagattcaatcgcgttgcagaccgaaggacgctgtgttttggcattgatgacgacctcgcttgccatttgaggatctgctgactcatctatgtacacgtggcaattgcccgctccggtttctaaaacgggtacggttgattccctgaccacaagatcaattaaatttttaccgccgcgcgggatcaatacatccagcccgtcatttaatgtaaagagctgtttggcggtttctttgcttgtatcttctatgagctgaacggcatcaatcggaagctttgacagccccagagcgcgtttcatcacactgacaagcgctatgttgctgtggatggcggaagaacttcctctgagcacaaccgcgtttccggttttcaggcagagtgtggccgcgtctacggtaacgttcggtctggcctcatagatcatgcccactactccaaggggcacgcggattttttcaatggataatccattctctttttgaatggtctccagcgattcaccgacgggatcttcaagaccgatcagcagttccacggcgtccgcgatatcgagcaggcgtttttcatcaagagtcagcctgtcaataatgtcaggtgtcagtcctctgttccgtcccgcttcaatatctttctgattctctgttaaaatcagccggcgttcatttctgagtccgtctgcaatacattggagcgcttcgtttttttcagccgtcgttttcatgaccatttcggcagccgcttcttttgccaaggctgctttttgcaatacttcactcatttgtgttccccctcgtcaaataaattcacccaatcatctctgtgaatcacttccacctgcttcgttcctgaaagctggtcgctccgcttccctttggcttctaaaatttcatcggatgagtactgcgtctgccctttgccgatcatgccgccgggccctttgacttccactacggcccctttcggaaaactgccgcagacatcggcgacaccggccgggaggagacttgacccgttatggatcatcgcctgctccgctcccccatcaatgatgatttcccctgatatcggagaatgaaacatgatccattgccgtgtattattcactgaggacaggtctttatcgccgatataagtgccgtcgccttttccgtctaaaatcaccatcagtttttcccgtccggagccggttccgataaataccttcaccccgagcgacaatgcggtctgggcggcgagaagttttgacttcatacctccggtgccgacctttgagcctgctgatccggcatatccgagcaattctggtgtgatgtcattcagatagtcgaaccgctttgcgtccgggttttcattcggattggcatcgtacagcccgttaatgtctgtgagaatcattaattggtctgcatgaatcaaaccgcttacaagcgccgacagcatgtcgttatcaccgaacgtcagctcttcgactgatgtggaatcattctcattaataatcggcacgactccacgctccaacagttccattacagtggcataggcgtttctgtaccgctctctttttgagaaatcatttcttgttaataaaatttgtgccggcgtcagaccgtatctttttaaatggtccatatattgctgcattaaaagcgtctggccgactgcggcagctgcctgctttccttttatcgtaacaggtcgcgacggatagccgagagcggaaaaacccgctgccaccgcgcctgaggtaatgaggatcacttcatgcccgttttcttttaataaagaaatggcttccgtatgttccttgatttttgcttcatcaatacttccgttactgttggtgagcgagctgctcccgattttcacaacaattctttgttttttcatcgtttctcctccgtggcaatcaatccaaaccggctcccgtcaataaaaaaagcccattccgtcctgaaaaataaggacgaaatgggctttccgtggtaccaccttgtttgaacgcgtttttcacgcgtcccgctttcctgtaacgccaggttatcgcgcctgagttttcccctcaggactccaaggcaggttcggcaggtttcatgcggcaaaatgtttcagcgggccattttgctctctgtcacagaaagttctgcgtactgatcctcttcaacgctcaatgatttttttatattatgcaaagaaaacaggttcttgtcaagacattttcatccataaaaaacagtccgcctccccggcggaccgtcattaattaaatacgatcgttttgtttccgtgaacgatgacgcggtcttccagatgccattttacggctcttgccaacacgctccgctcaatcgttctgccgatattcttcagatcctctgcgtgatctctgtgatcgacgcgttcaatatcctgttcaataataggcccttcgtcaagatcgtccgtcacatagtgagaggtcgcgccgattaatttcactccgcgctcataagcccgtttatacggattagcgccgataaaggccggcagaaatgaatggtggatgttaataatccgattcggatgggcagatacaaaatcagacgtcaaaatctgcatgtagcgggcaagaacgatcacatcaatcttataccgctccagcagctcaagctggcgccgctccacttcggcgcggatgtctttgttagctttcatgtaatggaacggaatattcagcggttcgaccacttctttggcctcttcgtggttgctgatgacgaccgcaatttcggccatcatattgccgctttgccattcccaaatcagttcatgaaggcagtgcagctccttcgatacaaagatcgccacccgcttcagctcacttgccagagacaggctccatgtcatgccgaatgtctgggcgattgaggcgaacgcctgctgtaagtcctcttttttctcacgaatgcccttgcagtcgaattcgatcctaagaaaaaaccgtccgccttcagggtcagtcgtgtattgatttgattcaataatgtttgcgccatgttcaaacaaaaacgcggacacagccgatacaattcccggctgatcggggcagctgacaagcaggcgccctttttcctcattcccgcggcggtattctttcagccgctgtgtcatatatgaattcatctgttttaatccctcgtatcttcataattcgtaacttattatagattatactgaaaatttgataaaaatcaatttacgaaagaattttcagccctacggcagcgcataaaataagcgcaatgaaaaagatgcgcttcgcatccttctgctcgccgtagaaaagaatgccggctaatgcgccgcccgccgtgccgataccggtccagatcgcataggccgtgcccatcgcgatcgtctccatcgcataagaaagcagggaaaaagaagccgcaaatccggcgataatgaaaagaatccatttgactttcttttctttttgaaattgattcattaaaatgaccccgagcatttcacaaagacccgcggctatcaggctgatccaatgcattacgccttctcctccttcgtctcaggcttatcctgtgtgaccagctttaatccgatgacaccgatcagcaaaacgccgatcagcacgattttcaccggatcggcctgctctttgaaaagcaggatttcactgagcacggtgcccgctgtcccgagtccggtaaagaccgcatataccgttcctacgggcaggctgtctgtcgccttgattaatagataaaaactgatgatgattcccacaatcgtgccgctccacgccagtgccgaatcagcatgtttcaggccggtgacccataccacttcaaatacggccgctatgaccactaaaccccatttcatgttcttcaccctttctgtatccggacaatacaaaaaagcccggatagtcgtctcacatgagattgactctcccgggcttttttccctccgtgtgcatatgcgggatatgtccgcatatgtgttttctctcggaccaggccatgtatgaacatgcggaaccctagaaaacatgtctgctcgtatcatactacatttcgccgaaacgttcaacgtcagatgtgatgtcaaaaaccgtcagctgcctctcccatttggtaacggtctcaccgggcaccataccgattttttccgcgacacggacggaggcagcgttttccggatcaatcagcgccgctatgcgtccgtattgctgcgtatgaaaaccgtagtccagacaggcgttcgccgcctctgtcgcatagccgcagccccagcggcggcgggcaaacatatagccgatttccatcaaagtgtttccgtttaccgtctgcggaacgattccgcattgaccgagaaatgcgcccgtctctttatcctctgcgatccaaagactgacgccgtatcctgcggccaatcgtttgttccaggcaatccattccttcgtttcccgtctgcttttaagagaaggataatatttcatgacctctctgtcggtaaacagcccgtacaaattttcttcatcgtcatcccgcatagtccgcagacggatacgcccggttgtcaggatggtgccggaagacttatgtttcatcatgcacgccacgtctcctttccctgtaatagattatggatccggcaggaaaagtcctttctcagcataaaaaaaccgctttttaaaaaagcggtttgacgattaccaaggtttatttgttccgagcgcctcggccagggccttgctgtgttttaagcggttttttcgttctccggcgcgctgaacggccgtattgtgaagcatgatttcttcctcagtttccggcacgatccgcggaacgggtaccgatttcccgtttgaatcaagcgcgacaaaggtcagaaacgacgttgccgcaagctcgcgttcgcccgtcatcagatgttctttaatgactttgacaaacacctccatagacgatgtgccgacccatgtgacgtaagattcaaggcatacggaatcctgttggccgatggggcgcaaaaaatctacagaatccattgaggccgtgactgtttcacaccggcagtggcgtgccgcggaaattgaagcgatatcatcaatgtagctcatcagctttccgccaaacagcgtattgtgattattcgtatcaagcggaaaaaccctgcttgttttaacaacccttgtttctttgcaaaatcttgattctggcaacttcatattatttaaactcccctttggtgtctggtcgttttgactcattcatctgtaccctattaaacaatactttgaccgttttgtctaaaattttaaatattaagttggttagatattctctcataaatgttttattattcatcacatccgggaataataaacgcacattgaataccgataggaggatatcacatggacgtatccattcccaaatccacgcggaaaccggcttgccgcagtgagtttgatgctttgcagacagtcatcttatgccggccggaacacatggccatcaaggatattattaacggaacgcagaaacatttcaaacaagaaaatattaacatatccgttgccctcaaacagcatagtgagtttattgacattttaagatctcatcagattgaagtcgtcctgctgcctgccgatcccgcattgcctgagcaggtattcacccgggatatcggatttgtattaggcgagacggcgtttatttcaaacatggcggcttcagtccggcagggagaagaaaaagtgtttcaagacttgcttgacaataagaaaatcccttatacgcgactgaaaaaagcgaatattgaaggcggcgacatcttgatcgcagacggcaccgtttacgccggactgagcgagcgcacggataaagcggctgtccgggagctgcgggaggcgctgccggagatgacggttgtgccgattcctctcaaggaggatttcttacatttggactgtgtatttaatatgatctccgaaacggaggcgctatactgcaaaaatggcttgcggcagaaagaaattgatcttctcgccgaacgttttgagatgatagaagtgcctgaagaagagcaattcacgctcggtccgaatatcctgtcactcggcaatcagacaattatcagcctgccgcagcaccgtcatacgaaccgcgagctcagaaaaagaggttatacagtcattgaaaccgagttttccgaaattattaaatcaggcggttccttccgctgctgcaccttgccgcttgtcagaacatcttaaacatttacaaggcagtttccttcaagatacgttaatatagagaagacaagactctaaagggggaaaccgaatggctaagtacataggatacgcgggaacatatacaaaaggcggaagcgaaggcatttattgttttgaacttgatacagaagcgaaacggctcagccgtccgaagctggcagcaaagctcggcaacccgacatacgtcactccgaattctgataacagcatgctgtattccattgaaaaggcagacggaaaaggcggcgtcgcagcctatcagattcatcagaacagcggggaattaacttttgtgaatcaccagctgattgaaggcccgtctccatgccacgtcagcattgatgataaacatgaatatgtgttaaccgctaattaccacagcggaaaagtacacgcctttcccgtcaatgaagacggaagtctgcgggagccggctgccgaagccgctcatacgggaacaggtcctcatgaaagacaagagaaaccgcatacccatttcgcaggctatacacctgagcataactacattgcagccgtcgacttagggacggatacgctttatacttaccaaatgaaaaacggttcgctcacagaggtgaaaactcactctttcgcaccgggttcagggccgcgccacatcgttttccatccggcggaaaaatacgcctatgtcatgacggaaatcagtaatgaagtcatcgcgcttgaatacaacccgaccttaggtgaattcagagagctgcaggtcatttccgctttgcctgaaggctttacggacaaatcgcaaggcagcgcgatccgcatatctaaagacggcagatttctttatgccgccaaccgcggacatgacagcatcgccatctataagatcaaccaatattccggcgaattgtctcttattgaatgggtgccgacagaaggcaactggccgcgtgatttcgcgtttgacccttccgagacattccttgtcgcgtcaaacgaagaaacgggaaatctggttttatttgaacgcgacccggaaacgggcaaattgactctgcttcaatctgacattccggttccgtatccggtctgcgtgtcatttctgcatcaggtttaattaaaaaagaaagctgactttatattgtcagctttcttttttgtataaatggcaggcgacaaaacgccccgccttcacttcttcaagctcaggcgttatcttaccgcagagctccatcgcttcaggacaccgcgtcctgaatacacagccgctcggcgggttaagggggctcggcagctcccctttcagaataatccgttcacgcttgtcctcaagaagcggatcaggaatcgggattgaggataaaagcgccttcgtataagggtgaagcggttcccggtaaagcgcagcgctttctgtaatttccatcatgcggcccaaatacatcacgccgatccggtcgctgatatgcttgaccattgataaatcgtgagcgataaataaaaatgtcagccctttctctttctgaagcctttttaaaaggttgacgacctgagcctgtaccgacacatccagcgcggaaatcggctcatccgccacgataaattcgggatgcagagagagcgctctggcaatcccgattctctgcctctgtccgccgctgaattcgtggggataccggctgccgaaatccggatggagcccgacagcttcaagcagttcatccgccatcatcagacgggcttttcttgtattgtaaagattgtggatttccatcggctccataataatttcccttacggtcaggcgcggatttaacgaggcgtaagggtcttggaaaatcatctgcagcttgcggaagaagaccgaccgctgttctgccgcggcacggtgtatatccgtcccttcatatgataccgaaccggccgtcgggtcatacagacggagaataacccttccgagcgtcgatttaccgcatcccgattctccgacaagtccgaatgtttcccctcttttaatgtgaaagctgacaccgtcgactgcttttacggctttctttcttcctgcgtcaaaatgcattttcagcccgctgacttcaaggagcggagatgccgtcattttctattcccccttttcgcttatacagcggcgtacggtgcataattctttttcatagacggttccttccaaagacagcacttcgattgtttttcccgttttcggggagtgcagcattcggccgtctcccagcgccaaaccgacatggtggatcgcgccttttccttcttcataggcgaaaaacaaaaggtcagccggcaggatatcgtttaccgccgcgccgcatccggcttttgcttggtcctttgcatcacggggaagggtatagccgtttgctttaaatatcgaatacataaacccggaacagtcaaacccgaaaccgctcagtcctccccataaatacggaagcccgagaaacatcatgcccgtttcgatgacatcggccgcccgtccttccgtatgccggcactcgtctgcgtcagcttcatttacgaacctttctccgagcggcgtcaccacccggaaaaagcctttctcacgtcctgatgccggaagacgcgttaagaaacttacttccaagtccggttcgccgtttgtgtgatataaaatagctgtcggtttggtaatccatacggcgggggaagatgtatggaagccgtcttttgaaagctggctttttttcatccaccccggatatccgcgcacatccttgtttgaaggctggccgggaacggcgacaaaagcccattccccttcctctttgagaatgatcacttcttccccgaaaagcgcttgcgtttggacaaggttgtctgtgcataattgcagccgctcttcatatcccatagacgctaaccattttctgatctgcggcgggttttcgagcatcggcgcatcatccgaacggggagatgacggcagcgtccatacgttggctgccgccgctgtaacggctgctctcatcttttcgcctcctcttgtatcgacacaccggtaatgccgagacccggttcgtcgggaatcgtaatctgactgccgctgtatgtgatgccgccttgaatcaaatcatctttcagcataagcggcgcatcaaaatcaaacttcgtcacattccgtttgcccgcggcaaaatgggccgcggcggtgatgccgagcttggtctcaatcatgctgccgaccatgcattccacgccgcacgtttccgccatcgcattgattgtttccgcctgctttatgccgcccgctttcatcagcttaatattaattaaatcggcgcttctcgtctgcagcacgtgaaatgcctgacggggggtaaagacgctctcatccgccataatcggcgtgtctacggcatctgtgacctgcttcagcccggcgatatcgtctttgtgaacaggctgctcgaccagctcaatgccgaggcctgcgtcttccatctttcggatcgcagtcacggcttctttcggcatccagccttgattcgcgtccaatctcagtttgacgtttccgccgacacgtgatctgatcgcctgaatccgcgcaacatcgtccgatatgtcacctatgccgacttttacctttaaaatatgaaatcctttgttcacataacggtctgcatcccccgccatctcctcaggagaattgacgctgacggtaaaatctgtttccagtgtattccgatagccgccgagaagccggtaaagcggctgtccgtgcatttgcgcccatccgtcatatacagccatatccaccgcggcttttgcgctttgatttctttccaacagccggctgatatcaaacaaaacggcttccgtgccggaaaggctccgtcccaagagagccggcttcagcacatcgtggacggcgctttcaataccggccgcgctgtcgcctgtaatgacaaccgtcggcggcgcctccccccagccggtcagaccgttgtcaaaagtgagcttcacaatgaccgattcagcattgtaaaccgtgcgcaaagcggtcttaaacggctttttcagcggcacggacatccgtcccgtttgaatatctgtaatcctcacgcctgatcactcccttccggaaacccccgattcaatcgttaccgctttggccgccgtatccataaccgcgcgggctccgatcggaacggcgaagctcggtgaacaatggccgattttaaagcctttgagcgcgggcttccctgatttgacaatgtaatcgttcagcacttgctctaaagtaagcgacttttctttatgcttcggttcgcattggtgaaaatcacagaccaggattccggctgcgtctgacagttttccggccatctttaattgattcagcattctgtcgatttgatacggctcctcatcaatatcctcgataaacagcaatttgtcttttgtatcaatttcaaacggcgtgccgagtgtggacgtaatgagcgacaagttgccgcccgcaagctctccctcggcccttccgcctgtcagcacctctaagggagaaatgtcctccgtataggtaaattccgtttctgtaaaaagctgatgatacgacgcttttgtcaggggatcagcattttcaagcccgacatctgtgctcagcatcggaccgtgaaatgtgacgagccccgtattttgatgaatggcggtatgtaaaaacgtgatatcactgtatccccagaaaattttcggattgcggcggattaatccgaaatcgatgtcggcggcaatacggccagtgccgaatcctccgcacgcgcatatcaccgctttgacattctgatcactaaacatgtcatggagatcatcgagacgcgcccggtcttctcccgccaaatagccgtgacgggccttcagcgcccggccgagtttcacttgaaggccaagctcattctctaaaaacagcagcgcggtttgcagcgtcccgctctcaggcgggcttgcgggcgcaatcacaccgaccgtgtcgcctttttgcagtgctttcggtttatggttcatgactttttcaatctcctttccggattgaaaagtgaaacacgccgctcctttaacggcaaaagaacggcgtatgtttccgctgtaagatcaggacttttccgcccacttcagatcaatgtaaccgacggggtgccggacaatgcccttcacgccgctgttctgcagatgcacctgattgtaaaagtaaatcggaatgatcggagcctcgttcatgagcagtttttccgctttatgcatgagcgcaaaacgttttttggcatcggcttcctgttttgcctgcttgatgtagccgtcgtatgccgcgctgccccagccggtgcggttcatggaattatccgtctggaaagcctctagaaaactgatcggatctgcgtaatccggtaaaaatgagctttgagagaactggaacttcagtcctttctgctcttctaaaaagacgttccattccatattggcgagcttaacgtctataccgagcacacttttgagcttctgctgaatcgcttccgctattttcttatgctccggttttgtgctgtatgtcaatgtaacggcgggcagcttgtcataatgctcttctgccatgcctttttccagcagttttttggcttctgattcatccggatttaataaactgccgcccgcttcgcggaaatctttcccgtcaggctgagtaaatcccggggatacaaaggcatgtgccgacttttcactgtttttggtcacataatccgtgatttctttctgatcaatcgctgccgcgaacgcttttctgatcttttcattttgaaacggctccattttcacgttaaaacgatagaaatagagtccggcctgatcccacgtgcggacattttttcctcccatcagctgctcgctcagctctgccggcacaaaggcggtatccaaatcccccgactggaacatctgataatcggtattccggtcactgaccatcgcccatgtgactttatccagtttcaccgtctttttatcccaatacgtctcgtttttgaccatcgtcatgctatcgtcatgcttccattccgtcagtttgaacggcccgttgccgacaaaggtttttgcttcagtaaaccatttcggatcagccttggcgaccttctcattaatcgggaaatacgccggattggacacgacgctcagaaaataatcctgcggtgccgccaatgtgacgacaagcgtttttttatcttttgccgtgactttcacgtcttcttgtttgccttttccgctgttaaattcttccccgcctttgatcatatagccgagaaaagcggaagatgcgcccgttttcggatcgagcatccgtttccaggcgtacacgaaatcttccgccgtaacgggatcgccatttgtccattcggcgttatcccggatattgaaggtatatgtcagcttatcagcggacaccttccagctttccgccatggccggttcgggcttattatcttttccgagcctcgtcaatccttccatgatgttattcagcggctgccaggaaacattattaaatccgatcggcggatcaagtgaggtcggctcattttcgttattgagccgcagcaccgtttcacccccctgttcttttgctttgccgggttctgtccccgcctgttcattggctgtacagcccatcagagcaaacgaaacaacagcaatcacaccgatcgcccatctctttttcatttcaatccccctttttcctctgctgccgtcagctgctgcttcagccgctctgcacggtgatcctgaagccagcagttgacgatatggcttttggatttcacggttgttgccgggtataccttttcacagacgatcatcctgtccgggcagcgggcggcaaacgggcagcccggcggcggatcgaataaatcaggcggcgtcccgtcaatcggcgacagctcactatcctccatatccagccgcggcactgaacgaagcagcccctttgtgtatggatgagccggacggtaaaaaatatcatgcctcgtgccgatttcggcgattttccccgcatacatgacggcgactctgtcggcggtctgagcgacgacgccgagatcgtgcgtgatcagaataatagacacgcctgtttttctttgaatcttcttaaataattcaaggatttgtgcttgaatcgtcacatcaagagccgttgtcggttcatcggcgatcataatttccggctcgcagatcagagccatcgcaatcacgatccgctgccgcatgcccccgcttaattggtgggggtactgcttcaggcgggatttcgagtccgggataccgaccagatccagcatggcgagaacttcggattcagcttgttttcttgtcatggcgcggtgttccaacagcgcttctgagagctgatcgcctatggtcaaagtcggattgagcgccgtcatcgggtcctgaaaaatcatagaaatatcgcgcccccggattccccgcatttcccgatccgacatttggcaaaggtttttctgtttaaattgtatgcttccggattcaatctttgccgaatgtttcggaagaagacccatcacggcttgtgacgtcacgctttttccgcagcccgattcaccgacgatcgcaaacgtttcacctttatataaatcgaagctgacgcctctgacggcttttacagtgcctccgtatgttgaaaaagtaacatgcagattttgaacggaaagaacttgctgcgccatttttcctacctcctcagtttcgggtctaacgcgtcctgcaagccgtctccaagtacgttaaacgcgtacatcgtcaaggaaatgaaaaaagcggggaaaaacagccgccaccaatggcctgataaaatcgccggcagcccgtcgtttgccatgactccccagcttgcaaacggcgcctgaatgccgagtccgagaaaacttaaaaatgattccgcaaaaatcgccgccggcaccgtaagcgtcatttggacaataatggctcccatcgtattcggcagcagatttttcttaatgatccgaaatgttttcgctccaaacgttttcgaagccaatacgtgttcatcatgcttcatcctcagcacctgccctctgacaatccgcgccatgccgacccatcccgtcacggtcaaagcgacgataatggaactgagccccggccccatcagcaccattaacaaaatgacaacgagcagatacggcaatccgtagagaacctcgatgattctcatcatggcgctgtctgtccggccccctttgtaaccggcgacgcctccgtagatgacgccgatcaaaaagtcgatcagcgccgccatcacaccgacaaataaagagatcctcgctccgtaccacgttcttgtaaacacgtcccggccaagttcatcggttccgaaccagtgtgaaaaagacggcggaagattctgctcggcgagcgtctgccttgtcacgctgtgcggtgatatcagcggaccgaacacagccgatagaaacaggcagcataatatcacaaggccggccatcgccaatttgttctttttaagccgccgccacgcatcctgactgtaagacaggctcggacgcttgaccgactcggtttcaccctttctttccgcgcccggctgaaaccagtcatcaggcacttctgtgtgttttaccgtttcttgcgggagattcatcaggatcaccctttcttatgaagttttatgcgcgggtctaacaggccgtatgccaaatcaaccagaaacagcaggacgatcagaatcacactgtaaaatacggtcgttcccatgatgaccgggtaatctcgctgattgatgctttctacgaaatatttgcccattcccggtatggcaaaaattttctcgatgacgaaactgcccgttaaaatacttgcggcaagtgtcccgagtactgtcacaacaggcataagagcatttttcaatgcgtgtttgatcacaattttgacgggagaaagcccctttgcttttgccgtgcggatgtaatcctgagtcagcacttcggccatgcttgatcttgtcagcctcgcgataatggccatgggaccgacggcaagcgcaacagtcggcaggaccatgtgaacgggactcgtccatgtagctgccggaaaccatttcagatgaaccgcaaattgctgaatcagcagcgtagccataataaaattcggaatggaaatcccgagcaccgcaaggctcatggccgcataatcgagaaagccgccgcgcctgagagcggccattatgccgagcgcgagtccggaaataacagcgagcatgatcgccgttatcccaagctcaaatgaaaccggaaacccgcgttcaagcatagcgtttacactgtctgacggttttttaattgaaggaccgaaatcaaaggtaagaatggattttagatagatggcgtattgagtgataagaggttcgttcagatggtagtaggattcgagatttcgctggaccgcttcgtttgtgccccgctcttcgttaaaaggcgagccgggtatcactttcatcatgacaaatgtcagagtggtgatgacgaggacggtcataatcatggcgataaaacgtttgataaaataccgcagcaatgccgttcacccctttaacagaatgttgttctcatggcgagttctgtcatgacgagcatggcctgataggcttccggcatgtcttttgcctgaaattgaacgattgtcgttcccgggatgatttctgtgcccggcattaaatgggcccattcagcctgtccgtagttggcaaattcaatgcctaatacaggtctttcaggcggagtcagcggtttgaccttatctttatttttgagcgcataggctgttttttccgtcaggagccgtccggctttttgaggggacaggcatttgaccgcagttcttgaaatggtttgtttgacggcggcagtcgtcacattcgggatcagctcctccgcttcttttgcggcgcaatcatctccggcagccatgatgaccgggacatcgtaaaatccggcgagataggcatttaaccccagttcaccgaccggcttatcatttatgtaaaagtggcggacgccgaatatcatgctgtgcgacataacgcccggcatcgacgctctcgcatgatagccgataaacatcacacccgaatacgattcatcaagcccctgcatcatggaaaacggcttgacatcccccgtaatcagctctgcctcagggtgaagtttttcagcgagcagattattcatctttgagtggctgtcattcacggtcacttccgtgcatccgttattaaacgcttctgcgatgcaccagtttgcttcttcggtcatcagaaccctgccgcgctcataattgtgcatgcgggaattgacaaatgtttcatcaggcagtccggaaatcccttccatatccacagatagatacagtttcatgtaatgcctccttttttacttaaaatttcgatattaaattatgaatattctaacaaattatattaaaaaaggatgaaacatgcaatataccattctgccattatgggaaaaaacaaacccttttcaccgggaaaagggtttgctgatagaaatagttacatactgtttttgcttatatgatgacgctgaaactgtctgaccgcacttctgtattcatgatcgggaatgacctgatgcctgatcggttcaggagcctgcggcgaaggctgttcagcagcctgcttacggacggcatgcggtttatgcgccagcttatgtcccatgccggtcgcattcatgacaaatgataaacacactaaaagcaagcttaagatgaaagcaataagaaacaaatcgctgtatgtccccatcagcaggtcatgcggtgattgtgtgccgcgcgcgccccgaagcgtgccggaagcatctcttttcgtaaaataccctattaaaacaggtgcgcccatataaatgaaaagcctcaaaaactgaactgccgtcatgcgtttcaccagttccggaagcggtccgcccaacgcggctcccatcagtccggctgccacaataagccctgtcccggccgccagcatcacgaaaagccccgcaaatagaataagcggtatatgatgatccgccgtcatccattggaaattcacgaacaccagtataacagagcctgttatgccgagcatgcccggaccgactttatcatatgctaatgcactgatgacagcggcgatggccacgcctcccaaaaggctcgcataaaggaatatcagttgagtttgtgacatatgatatgcggtctgaagctccccgtgaaatgcagaaagactgaccgctatggaaatactgcccgcagcgatcatgaaaacacccagaatcggctttggaatcagcataagtttaatcgaaatcagcgcatgttcgtttctgtactgcatgatcagcaagatgagaagaatggcgatgcttcctccaaatcccgccaatgtctgccatgatgaaaagccccatttcggcagatgaataaatgtataggcggtcagcacggctgatacacccgctaacagaaaaccgatgccgtcaaatggagatttttcagcatttttatgagcgtcatcctgcagccacatataactgaaaatgaggccgaaaaaagacagcaggccaaaaatgccgaacagccaatgccaatggccggcgcttgccgccgccgtgcctaaaacggtccccataataacggacccgtaaaatccgccgattaacacaaataatgcgtaattccggcgctcaatcggaaacgaaagcaccagcatcggaatcataatcatcagcatagtacccgccgcagctccctgtaaaaaacggcccgcggcgagcggataaatatcatttgtcacagcagcaaggagcgctccgatgacacccgcggccatcgaaatcatatagacaggccgggagccgaatctttttcttaaatacggccccgccggcacgaataaggcaaatgccatattaccgataataatcggatgaaaagagtcaaagttttccccgccgaccgtctgccggacaaggctttggacagccgaaagagcggtattcgacatcagccccggcccgaccgccaatacagcgagcagagaaataatccagtgatgtttttctttcatgtgacagctcctttctgactatttgacaaagtgaaaaagctaacagatctcccccattagcttgacagaattttcatatcttttcatgtgaaggattgaacataatatctcatttattatttcaaatccgatggaaattgtcaatataaagcgccgccgtccgatttcgtctttttcacaatttcccacaatcttttcattattatcccacactttttgtttaagatggagtcagtaataataggcaaatcatgctatgatgaaatagagaaacggagtgaacatgatggataactatcgtgatgaaaatcggacagaccaaaaagaacaggaagtccttttagtaaaagaaaacccgcagccggccggatattccgcgccggacgaggacaagaaaaaacgaagcttcggctggttcagaccgcttctcggcggagtgatcggcggagggctcgccctcggcatctatacatttacgccgcttggagaccatcagactcaagatacttccaatccggctcccgctcaggaaacgtcatcggtaaccgccaagcagacatcttctgaatcagacagcggcaaatcggctaacagctcatcggcaaattcaagcagcatttcgaatatggtggaagacatttcaccggcgatcgtcgggatcaccaatctgcagaagcagcaaagcagttccgatttattcggattcggatcaagctcagattcaaactctaattcgtcgggtgatgatgcggaaaccggatcgggttcaggcgttatttttaagaaagcaaacggcaaagcgtatatcattacgaataaccacgtggtcgaaggcgcctcttcccttaaagtgtcattatatgacggcaccgatgtaacagctaaactcgtcggcagcgactctctgacagacttggccgttttagaaatcagtgataaacacgtgacaaaaacggcaagcttcggcagctcatccgctctcagaacgggtgaatccgtcatcgccatcggtgatccgctcggaaaagacctttcccgcaccgtcacacaaggcatcgtgagcggcttaaacagaaccgtctcgatctctacgtcagccggtgagtcaagcatcaacgtcatccaaaccgatgccgccatcaatcccggaaacagcggcggaccgctcttgaatacagacggcaaaatcatcggcatcaacagcatgaaaataagcgaaagtgatgtagaaggcatcggctttgccatcccgagcaacgatgtaaaaccgatcgccgaagagcttctcacgaaaggacaggtggagcgcccttatatcggcgtgagcatgatcgacttggaacaagtgccgcaaaactatcaggaaggcacactcgggcttttcggcaaacagctgaataaaggcgtttatattcgcgaagtggcgcagggctcacctgcagccaaagccggattaaaagcagaagacatcattatcagcttaaaagggaaagaaaccggcacgggcagcgaactccgcaatattctctacaagaatacgaaagtcggcagcaccgttgacgtgaagattatcagagacggcaaggaaatgacgaaaaaaatgaaactgactcaaaaagaagaaacatcttcttaacaaaaatccaaggcagccgccttggattttttatatacagctgaaactttaggcctggatcagccgtatgacttagtgtacaaaggaggatacatacacatgaaacaaaccggacttttgctggtcgttaccggactgatcttgctgcagctgagcattagcttcctcagcaaaacgctgcttggggaatgacgctgggtgcaagcattttactgaacctttcgggaaccggactgatcatgcgctctctgcacacgcagaccggccgcagatgaatgaaaaaagccgcgggacattctgtcatcccgcggcctttatttctgacataaaagcaccctgtctggccggacagggtgtttcggttaagacatatgctggtcccgataaatcttttcgtttttcatgccatacgctttttgcacgatatagagcggacggtcttttgcttcgtcataaatccttccgatatattcgccgatcattccgagcattaatagaacgatgccgctgaataacagctgtatcacaatcaaagaggaccagcccgtaatggtgctgttcgtaaacagcttcatgtataaaacgataaacatataaagaaaacccgctccggacatgatcattcccgcatagcttgccgccttgagcggtttatgagagaacgttgtgatcccgtccatggaaagcttcagcatttttttaagcgggtatttcgtttcccccgcaagccgctcatcacgttcatattctacagcagtctgcttaaagccgacccagctgacgagtcctctgacaaaaggatttttttcttttaatcttttcatctcatcacagacttttctgtccagcaggcggaaatctccggtgtcgagcggaatatcaatatcagtcacgctccgcagcagccggtaaaacatagaggccgtctgtttcttgaaaaaggtttctccctttcgtttcgttctgacggcgtacaccacatcgtagccttctttccactgctcaatcatatcaaggattaattcaggagggtcctgcaaatcggcgtcaatgacggcgattgcattcccctctgcataatccatacccgccgtgatcgcgatctgatgtccgaagtttctggaaaaatcaataattttcactctcggatcaatcagactttgctctcttaaaatctcaatgctgcgatctttgcttccatcattgacaaagatcaattcataatgctcttttgtttgatccatgacttctttcaggcgctgataggttgtctgaatgacgagttcctcgttataaaccgggacgactattgaatattgaatatgtctgctcatgttttttcctcctattcatcagattgaagttcgtatagtgaagctgactgattcattccgcccggcccgccgctcattcggctgtttttacccgcggccttgctgctttttgtatcagccggatcactatttttcgttttctgatctgtgcttgattgccatttatctgaagatactttctttccgtttttctcaacccactgcacaatatcgttatttccgcctttgcccattccggatgttaagaagtattttactttcccttcttttacgagctttttaaattgagtcagcgtaatggccgggtcagacccgctgaatccgccgatcgccatgaccgcttttttcgttttaataatgtaaggcgccgccgtattggaatcggttgcagcaaatagatagtccgctccggcgttgtgtttctctaaatagttgatcagttttgtattgacagatgcgttatccattcccatgccttttccgcttgttgaagcgagctgagggcctgtttcaggcaatgagctgttgcctccgtacagaagcggtgtgctcgcccaataaatcggcatgaccatcaagacgagaagggctgcaagtgaaacataataacttagcggtttttggcgctgtttgaatacgaacagggcgattgctgccattgcgccgagaacgcctgctccgatgctccagcctgcgccgatttgatcattgtagtttctgaggataaacagctcaaatccggttgtcacaagaatagcggccggcaatagccaagttttccatcccgcctgcttgcggtacagatgaacgagtgcgacccatcccgcaccgacaagtgccgcgatcggaggcgccagcataatgagataataatggtggaaaaattccgccacactgaagaatccggcaatcggcacaagccacgctgcccaaaagatcgtttccttctgttctgctgataatcgtcttctttctctcgccccggcgatcaataaaccggccattccaaaaatcgcaaacggcaggagccagctgatctgatcagataattccgattggaaaaggcgcagcggaccaggagttcccgttccgaacattcctgaacctgattgcattttcgagccggtgcctgtaccgctttttcctccgccgccgggaccgcctccgccgcttggaggacctccttgaccgccgcttggcattttcccgttagatggaggtgccgtcatactgccgttttgtggtttgtctccgcttgctgaactgctgcttgaagactggccaggcggtttttgcatttgtgaagaaccatcggaagaagacatctctttcgatgcgtttccgtccggcccgccctggccgccgccggaactttgccctgtcagccgctgaatcccgttatatccgaaagccaattccaacacggagtttgtctggctgcttccgacatatggccgtttgccggcaggaatattgtcaacaatgagcggccatgacaatgaaacggctgctaaaacggctaacgcgcttaccaatgaaatgatttttttcttaatcgtggtgtttgccgcaatcatatagaacagcaagaaggccggcaaaatcatataagcctgaagcatttttgtgttaaagcctgctccgacgacaaaaaatgccgccaaaagccagatcagtctgccttttctgatcgctttaaagagaagccatgtggcgaacaagaggaaaaagaccagtaaagcatcgacattgttcgtccgcgcgaccgctactgcgatcggtgtacacgccatgacaaatgaggcgatgcgcgccgccgtttttccgaacgtcggctttattaataagtacatgaatagaactgaacctacacccgccaatgcctgaggcaggatgacgctccacccgtgcataccgaatatcagcgcgctgatcgtttgaatctggtatgtaacaggcggtttatctaccgtgataaacccggctgcgtcaaatgaagcgtaaaagaaattatgaaagctttgaagcatactcgttaccgctgcggtgtaataaggattcaccgtatcatcattccagatgttgtacatattcaagaatgcggaagcgagtaaaatgagaatgaagactgcgtctatctcgcgttttttcattttcacctgtgttttcactccttttgtttaactttgaacaagtgtaacaaccaaatgtgaaaaatttattaataaacaaagacaattattttgccgtttacaaataggtaaaaagaatgacaaaacaggtaaaaaagcaaaaaaaagatgcccccgtcaagccgggaggcatctgtcatgatttctgatttactgtatcggtttcagccgtgcttctatttcagaacggcggtgttcgagataaggcgggagcgcaaccgttttgcctagctcttcaggtttttcatcaaccataaatcccggaccgtccgttgacaattcaaacagaattccgttcggctcccggaagtacagcgctttgaaataataacgctctacaatgcctgagttgctgaaaccttctttcgtaatgatgcggtgccataaagcaagctcctcttcattctgaacgcggaaggccacatggtggacgctgcctttccccggacgctcgcgcggaagatcgtttctttcaatgagatggacttctgtacgcgcgcctccgtttccggattcgagcaccgtaaccgtgccccggtcttcatgcgtttctttcccgatttcagtgaagcccagcacatcggttaacacacgcagcgtcggttctgcatacgggacggtcaattcaacgggaccaagaccgcggaaagaatattcttccggtatgccgctttgcttcaccgcttcaccgatgtcttttcctttttcgtcagctgtcagcacaagccgctgtccttcatgatcccaaaaagcgagtgtctctctgcccgctattgtcatgatgccgccatgagcgacctgatgctcttcgaatcgttttttccaatattgcagcgcttgtgcatccgggacacgcaggccgattgaagaaatactgtttgttcccgcatgaaacggcgcaatccgcggaatttcgaaaaacgtcaattccgatcccggattggctgcttcatcaccgtaaaataagtgatacatcgtcggttcatcctggtttacggactttttcacaagcttcagtcccaggatgttccgataaaaatctaaatttttctgcgcatcagccgtcaatgctgatacatggtgtattccattaactttcattatgttatcctccagtcaattatctcgatttcgagatattttatatatacaatttatgttatccggatcgcaaagtcaacccatctgcttcacagacagtctgcagactgccgctccgcaaataacgaacctttgatattaaaaaactattaatgttcgtttttaaaacggtattttttccttctcaaaagcagaaacctttatcttttagggaaaacaacaaaatcagaaaatttattttattcgtgtttcagcaattagggtttacaatatggaaaatagttttttcagcatgacgattttacatctggagggataggatatgcagattgaagagaacggacttaaaaaagagatcggccttaccatcgccctctcacttgttatcggcaccatcatcggttccggcgtatttatgaaaccaggcgccgtgcttgcctactccggtgatgcgaaaaccgcgcttatcgcgtggctgttaggaggcattttgacgcttgccggcggcttgaccgttgcggaaatcggcactcagattccgaaaacgggcggactttatacatatctagaagaagtgtacggcgaattttggggctttttgtgcggatgggttcaaattatcatttacggccccgccattatcggagcaatcggcttgtatttcggctctttgatggcgcacttgttcaattgggattccggctggtctaaattgatcgggatttcagccgttttgtttttaagcatcattaacattatcggaacgaaatatggcggcatcgtccagggaattacgacggtcggcaaattgattccgattatctgcatgatcgtgttcggcctttggaaaggcgatcagcatattttcacagccgttacaagcagcatgtcggacatgaatttcggcgctgccatactggccaccttgtttgcttatgacggatggattctgcttgcggcactcggcggcgaaatgaaaaatccggaaaagctgctcccgagagcgatgacgggcggactgctggtcgtcaccgccatttatcttttcattaactttgcgctgctgcacattcttcctgcgaccgacatcgtcaaactcggtgaaaatgcgaccggcaccgctgccggaatgctgtttggcgacatcggaggaaaattgatcagcgtcggaatcatcgtcagcatcttcggctgtttaaacggaaagattctcgcttttccgcgtgtctcgtttgcgatggcggaacggaaacagctgccgtttgccggacagatttcgcgggtgcatccgacgttccgcaccccgtggattgccgtgtcatttcagatcgcgctggccattatttttatgatcgccagcaatcccgataagctgtctgaaatctctattttcatgatttatattttttacgtcatggcctttttcgccgtgtttatcctcagaaaaaaaagcggcggaaaaccgcgcgcctacagcgtgcctttgtatccgatcattcctgttttggccatcgcgggttcactgtttgtgctgatcagcacgatcattacagatacactgagctgcgcgctgtccctcttgatcggcctcgccgggctgccgctctatttttggctgaaaaacggcagaaaaaactgacaaaaacggttccttttacgggagccgttttttttctggcaaaatcacgtgcaaaagttgacagcaaattcacatcttttgttatactttttaagcaagatgtctgaattcgaagtatgttacgtttttttggcgaagtgggtaacataagaaaaacaggatgagacacgtttttacgaaaaaatcaagaggcgtttttttcgactttatctgttttttttcgacaaaaggctatataataatttgatgtgtgcattgtctcattcaaacaatggagggtttttaatgataaaaagaaaaaaagataagttctcactccttttaacagaaatcgcaaaaaacatagacgaaaccgcagaatattttgtcaactttaaagtgacgaaccagacgactttaaaggaatttgccgatacgttaaaagagtttgaaacaaaaggagataatcatgttcatgtcatgattaaagagctgaacaaagcttttatcactcccattgaacgtgaagacatccttgagctgacaaacagcctcgatgacgtgcttgacggaatcgaacatttttcagcaatgatggagattttctcgatcacttcttccgatgagcatatcgataagttcagcggatacatcagagagtgcgcgaaggaaattttaatcacgattgaactgcttgcagaaaaccgattgaaggacattcaccctcacgccattaaaattaaggaatacgagcacagctgtgataacctgcaccgtaaatcattaaaaaatctgttcggcacagaaaccgatccgattaaagtgattcagtaccgcgaaatttacgaaacgcttgaggaaattgccgactcttgccaaagcgttgccaataaccttgaaaccattattatgaaaaacgcgtaacgaggggttataatggatactctattacttttaacgatattaattgtcatatgcgctttggtatttgacttcattaacggatttcacgataccgcaaacgcaatcgccacctcagtttcgacaaaagcgctgaagccgcggcacgcaatcgtcatggccgccatcatgaactttctcggagcaatgacatttaccggtgtggcgaaaaccattacaaaggacattgtgaatccttatacattagacaatgggtcagttgtcattcttgcggctctactcgccgcaatcgcctggaacttgatcacatggtatttcggcattccgagcagctcttcacatgcgattatcggagcgatcgccggagcggccattgcagcgtcaggttttgcgacgcttaattataaagggttcattaaaattatcgaagcacttattttatcaccgatcatcgcctttgttctcggctttatcgtatattcgatcgtgaagctgatttttaaagacagcaatttggcgaaaacaaataaacgcttccgcagagtgcagattttgacggctgccattcagtcctatacacacggaacgaacgacgcgcaaaaagcgatgggtattattacgatggcgcttatgacggccaatttacataaaagtgatgccattcctttttgggtgcagctctcttgtgccctggcaatgggtctcggcacatccatcggcggctggaaaatcattaaaaccgtcggcggaaaaattatgaaaatccgtccggtaaacggcgtatctgccgacttaaccggcgcagccattattttcggggccacgtttattcatctccctgtcagcacgacgcacgtcatttcgtcttccattctcggtgtgggcgcttcccaccgcgtaaaaggcgtaaactggggaacggctaaacggatgctcattacatgggtcatcaccctgccgattgcaggtacactcggcgccatcgcctttttcatcctagatctctttttctgatgacatccgcttctttacagaagcggtttttttgtgacaggaaaatgatgtcatgacatagaatgaacatagcagaccatttttcaaattgtgagggatgctcatgcttttgttttttcagatcatggtgtggacgatggcggccgcactcattttatatgtgtacgcatcctggcggtatgaggcaaaggtaaaagaaaaaatgtttgccatccgtaaaacgtggtatttactatttgtactgggctccatggtctattggacatatgatcccgaatcgctctttgccgcatggagacaatatttgattgttgccgtctgctttgcccttattgatgcgtttatctttttgagcgcgtatatcaaaaagctcgccggcaatgaattagagacggatacgcgggaaattttagaagaaaataacgaaatgcttcactcctatcttgaaaaactgaaaacctatcaatatctgttgaaaaatgaaccgatccatgtatattatggaagtacagaagcttatgcggaaggcatcagcagactgctggccgcttatgccgaaaaaatgaatgtcacggcttccttgtgcgactattccgcacaatcggataaggaccgcttgacggagcatatgcctgatgcggcggacgttcagtcccgtcttaaccgtaaagacgtctactatgatcaaaaaggcaggcttgtgcttattccgtttacagtccagaaccgccattacgtgatcaaactcacgtcggaaaacctgttgacggaattcgattatttgcttttcacatcgctaacgagcatttatgatttaatgctgccaatagaagaggaaggtgacggttaaatggagcaggcatttcaaaacgggcagccggaacaaagagcgaaaccgttcaaaatgtttaaaaaacgttcaatgacaagtatcgcaagttaccaggtcagccctcataccgccagaattttcaaagaaaacgagcggctgattgacaagtataaacaaaaaaaagcttgattacactaaggacaggagacacggctcttgtccttattccttttttccatatctttcatataataaaaccaacaaagagatgcgacaggtgatgatgtgaagaaaattgtcaggcgcgtaaagtttgtggattacggacgcttcgggctttccgcttattcgctgaggatgcgggcgaggaatctcaggctattgaaccggttaaaaaagaaaaaaggctgaatcccgcaatgtgaacgggactcagcctttttttgttaaagctgcatcagaattttcgcttttacagcgggaccgtagacgccatcagacgtcagtccgtttacagattggaagcgggccacggcatctgccgttttcggaccgtagataccgtcaatgccgttattgacagctcctttttcaggatagaagtaaagcgcggcgagcgcgttttgcacctggtataccttttcgccggacgtgtacggctctgtcagctgaatcacctcgtccggaagagaatacagtgcttcaaccggcgggctgacgatcagtacttgtccgactttaatcaggttcgggtcagcgatgttattccatttctgcagatcggccacgctgacgccgaatttccgcgcgatcgccgacagcgtatctcctttttggacggtatacgtctgtctttccccagaaccgattcccgctttaaactcatcccatgtatccaacagtcttctcggacaaagctttcctgaccaatgcttgtgcgcaacgacatttgcaagcgggatgccgtgcgaggtcattaatgtgcggatgagccattgggcgtttgccacggcctgtgaaaagttgccgtctgcgttttcacaaatttcaataccgatggatttacggttgccgtccccgtttccgtcaccggcatgccagccgttttcgttcagcggaagatgctgataaatttccgtatcatcgactgtgaaatgccagcttgtcggtgtatcgggatttttcacatagcttgcgtgacttttggcgttagctccgactgcggtattggctgtattgtgcaccgtaatgtaaatcggtgtcattgcatagcctggacggttattgtttcctgccgggataaaatcctgtgtgatttttaccatattctcatctctcctatttcgataaattgtttatttttaataaagcctgctgttttttcccttttgctgtaacgtaattgtttttaaaccaggcggcggcagtcgttatgattgtaaaaacggccgacccggcggcatacagcgtatctgcaagctggctgacctggtcctcctgaatattcagcggcgatttgccgaacatcagcaaagtttgattcaataaagcaagcaaaagaagcaccgtcctgacgaccgtgcctttgtccgcgaatttcatatcggtttcccccttacttttgcagcagattgtacatgatggcgatggctccgccaatgacgcccgtgcagattgctgtcacgatcgctcctgtaatggtccgcttaatccatgttgtgttttcgtcaattttgttcagtttttcattcagcgtcatgatttgctgatcctgccggtcggatacccgctctaatgcggccacccgctgttcaagcaccttttgttcacctttgatgcctgcgaattctttttgcaccgcttgttcatccagaagcacttcagctcccccctcttacattgttctcacctcccttcggaagcttcattcttacgaaaatgccgtgcctttgacagaaaggctcccgccggaaatgcttttgatttccatgacgatttccttaaagccggcaatatcaaatgaccacacttcttctgtgcctgacgtaccggcggctgatgtcccgtcatcagacttgattcctctgatcggcacgttttttcccgagatggatctcccccaaaaggcgacatggcccgactcagcggtgccggtgatttcgacgagaagttttttccaagcgcccgccgagaagatgcttccctcgcccgcctctgctgcattttcatgaaaaatcacatctgtatatgaaaacgccatgtcaccgcccgaaccgacagattggtataaaacaaattcggactgtttttgatttccattttcaaaacggaaccgataatatctttttgtcaggctgacccaacccgaagcggtcagcactccgccttttactgcgacagaatgtgaagccgtccacgaattgttatcctcgctctcttcgataaaaagagttccgctgcggtccgaataagcccacccctgtgctctgtctattaagacggctcctaaacggtcttgtccgaattggctgtaaacttcaatcgcttctagcggcgtattggtaagaagctctgccattccggacaaatcagcaacaggtgtgacataatcgtttttgttaccgcgataagcttttacggcgccgggcctgccaagttgatcggcgggaaattcaaatgaatgctttttcattggccgtcctccttttctcatttattaaaaacgacaaataaaaaaagccgtttggcttatgacacagcatttttataattttcgtatgtttcacccgttatttcttgaaattcctcaggcgtgatatacttcgcggccacaccttcagccagatcttcggcagagcagtcatcatagcccatagcctgttttaccatttctattgtggcccacttataaaacaaagcgtaaacccaaaagttaagtctcttcattttttcattctccttttacgtttaagagttccagttttaaagacgctatttgttcacctaaagttttattcaacatctctgttttctcccttgctaccacttcggcagacaattgtacacctaaagcattttgagcttgttctgcttgttttctcgctagtttttcatctgccagttgctgtccgatttctttcaactgttccacaatgggatccggctcccccacatcctgatacttgtttttttgattttccttatattcttgatcagcagattcgttccaaattttatttacttcatcaaactgcggcctccataagccgtccggaggttttatggttgttgagttttgcggcattatacttgatgtactgtctaagatttcaggcctttgaaaataaaaattctcatcatacaaaaagacttgcatattcatcccccattacaaagtgaaattattatctattgaaatccctgtaatattcccctctattttggcatatttcccgttaattctcagttctcccgttggttcggcataatattttgttatcccggttgttccaaagagtggggcagccattgatttctgtgttgaaggatgagcttcagaaggaagtacagcaaaaacgctgtcgaaatctgggggaaccacttcaccacgtgtgaatacttggttgccccacactgcatactgaggatttcttgcgccagccttatgcccattaattagtgttaaatcataccaggtcattttattaaattcttcttcagtaaatagacgtttccaccccttaaaaacaccgtctgtatgaacagtcgcgatccatacattattatcgtaacttctccaagccaaaatcgactttctacctgactcactctcaatcacatcatagttaaacaaggaattatcattttcaaccggattgtttttcagctgagcacccattccataataaaaccccgagctcagtgccagtatgtctgatccgctttctaagcgtgtccgtttcccatcatcctttgtcaatttcgccaactggccgccgttccatttgtctctttcgataggacttatatgaattgatgaatctatcgcatgtgcatcgacctttgactgcgctccagctatggattcaattggataccaattgattgctgtttgattagtgttataataaaaccaccatgcattacccttcacgtctacagcataaccattacctattcccggctgccccactaactgcatacctcggagactcgtatttgacgggttgtctgttactgcattggttccgtaaaaagttacagaaccaacatcttttaacgagtcataaaacgagccggaagttaaattgattttttgcgtgccgttatcagcggtgattttaaacagctgccctgcattccatgtatccttttcagctttcgttacatggatatcagtctgatttgtgtgggcatcgacttttttttgggcgccttccgaagtttctaactgaacccaatcagaccagccggaagctttaagggtttttctccatgtgcctccttcataatccattgccagagcctcaccataagacttgaatccgatatataagcctctggtggaaagcggaggagtatgaactcccgtgttatttgtgtaaaagaaaaaagattgattaagctggtctacaatttgatgaaaatccaagccatcttgtatacttattaaatatttccctgaatcatccgtcagctttgttaattgcccgttattccacttctggcgctcttccttcgtcacatgccggtccagatcttgattgtgccggtcaaaatctttctttgctgcctgctggacattgtctacgtttccgaggccgatttgcgcctttgtcgttttgtgcgggttgttcatgtcgtttttatgggccgccagatccgtgtgtgcgtcatttatgcctttttcccagcggttgacgtcatcttcgttaatcggatcgtccggaagccagtctgttttttcttcgtaagccatcgttacaccacctcaaaggtaaatcttaaatcaagcgttctgttattgctgagatctaaatttgtttttcgttctgtaatgacgcttcctgtttcgtcaagcatctgcacggtttcaatgtgtttgacgtcttcttccctgcgtgtgagaacggtgactgcggcttcttttacggaaatgtccgcaatcggagcttcttttccgtttaacagcacttttgtgatcctgtttttcagatcggctgcggcacgctgtctgtaagcggctgatatcatggtaagaccacctcgttattgttgagtgtgacggaataaccgaccttcagttcactgacttttcggtatctccgattgttgagaatgacacggtctttgatttccagtgtttcgtttaatgcagctctcagtgtatacgccaaatgagcgggtttgattttttcaagcgtttcaatcagctcgttcatgtgctgcaggtcatcaagcccgatatcggcataaaaacgatactgccccggaaacatccgaacgtaagctgacggatgttttaaaaaacggtttagcgcctgctcgatcgcttgatgtgtgatgggcggaatattcgacatctttgaaatcagcctgagccgtctcatatcctccgtgtcacctgattcccgcggtatttttaatattttttcccagcgttcaagcccccacgtcgccgtcgtgataaagagctgatctgtcaaatcgaaaatatcgttattctgccgctcaaactcgggagcttccgcctcaagcagttgtgccatttcctttaatcgggttaaaaacggcgggaggtacgccgtcatctcatcgagtctgctcaaggattgtcacctctttgagtttaggaatttccacgtcactgagcacgaggttttccgccgcaccgttcattttgatatcggcatagtcactgacggatgccgagttataaacgatgttgttaatttgtgataaacggacggtgttttcttcgaaggccattttcttaaataaattcaggacgcctttttcaatctccgctttcacgtcatcgatcgagctgttcagctcaggcagcacggaagcggagatttcgatttctttccatacggcgctttccaccgttactgccgctccgatcggcgcctgtccttctccctgcccttcgtccggatcaatataatcctttactttcttgatcagaatatctgatgccggttccaaattcgcatttgtgatgacaaccttcaccgttccggctccgttccaaagcgggaagattttcgccctgccgacgccgtccacctcttcggcccattgtttatagtgctgtttatttgcgctgactgcttcccggcggacacgggtaaaatagcgcgcccttaagctgttgtcatcttcttcctcacggccgggaattaatatatcgcgcacgactgctttctcaagcccgggtatcgtatcaagcggcagcaggttctgccctgaaatgccggcattgcccgcttcaccggctgtttcacattcaagcgttccatcccccgtatattgaaaatacaggttatcaacgaagaaacgagagcctggcggaatggtgatgcccgctgtgaattctccggctctgaccgcttttgtggcaggtgttcgttcaattcccgcttcagcagcccgcctgtccagaaattctccctgagccgtatcggaaaacacgagctccagcacggtatcaagccaaatataagactttgcgagctcagcggccgcaggcgcgagcgcattgtaaatgacgctgccttctctcgtatcaatatctgccgtaatgcgcgtcagcattctgtccataatgtcgtcaaacgtctgagcttcaaacatcctcacccagcacctcctctatctcaagcatgccctcatcagtttcaacggtaaaagagacggtgaaggcatcatcttttttctcaatctcaaaattggtaacagccaaaatacggtcatcatacagcaaggcttcttctatcagtcttggaatctccatttttttataagcatccgtcgtgttctgatctgaaagcacttcctgcagttcatttccgatatcatggctgaaaaccgaatatgaataccgttctgtgtgaagagcgatatagacgaattgtctgattgcgtccagtccgtttatcagttcattggtaatccggttgttttcaaaatcaattcggtaggtttgtgaagtttcaatggcctcactcgcatcctccaaatcttcaaattcgatttccggtgtcagggccattgcacccgctccttttagatttgatcatgtaaaaaagccctcttcggatgatgaagcggctttaataggctgatattctcttacatttccgtccgaacgccggttaaattttgtccagtacaaagaaagactgccctcctgttaaagcggcggtcatcacccgatctcccgcctggagctgatcatcttctccggatctcagccgcttcggcacaatgagtgcatcagacggaatcaaaagtttgtcgtgatctttcagtttcagctcaagcggcgaaacggaggtcacttcggccggcatcagctccaccggcgcttcggcgtcaaccgctccgacggctaaatgtttaatggcatcacttaatctcatcaggatgtcccctccggaagtgaatttttctccgtgacgtcaatcgtcatggtatgttttgttccttggaattcatggcggtccgtatctacataataggttttcttcagcccgatttccggaattgagatatagaccggcaatccgctttccaaccccgggataccgatggcctgtatatttttcagctctttcttaacgccttttttctcagcctgcttcacttttgcgcgctgtttcagctgggcttcgttaatgtcgtcagaaaccgtttcggtatactgcaaaacgccgaatgttttcatgcccgcgctgtctgacgcggaagcctttatcgttttattgtctttttgcagccgcatgacgacacgggttgcggtgtcatcaattgaggtgctgtattgataccctgtgatattaactcctgtttccagcacccatatgtcagacggctccggccattcacgcaagccgagcctgcctttttctgaatagagctgataattgcgccccgtctggctttttgtctgctttaacgcttttagcatcatatcgtaaagacttgtatcatttttaaaaacgagtgatttaatggtatggcctgtgttggcaatggatgtgacgggaatttgaaaatcactggcgatcctttttaatatttgatcggcgcgcttgttggaaaacacgtaaacgtcctggtttttcacaaggtattgaagcatatcgtatgcggtgaaggcgacggtatgctcatcgggcgttcttgcaaaaacaacgccgcggaacagctcttttccgttccatttgaacaaaaccgtatccccttctgatacgccgtaatacgtctggctgccctgctttacgacaatcgtcgcttcgatggagcggggcgcctgatatctgtgtccttccagcgttacgctttctgtgacaagctcgagccactccgtttcttttatgacaaatagttcaatcatcttttcacccgtttcattgcggtatcttcagcttctgccccgggaagatccaatgccccggctgccggatattccgtttgctgcgcttaatcatggcggttttattcgcgttccagattttccgccactccgtgtgttttccgtaaaacttgccggcgatgtcccaaagcgtatccccttttttgacggtatatgttttgggtgaggctttggacgggcgcttcgctttcgtttttttcttttgtttgatttttcttggcgaagcggttttatattcttttagtacgatatcaaaattccggtcgccgatttcattgtcaccttcgctgtaattaaagctttcaatgctgcatgtgacattgatttttgttcctgtaatcaaaaactgaacgggttttttcgctttcatccatgcttcaatggctgaaatggctttttccggcgaagggatgctttgatattcggcaatcgggctgtaccgtttcggaaaaaaagaagagaacgaaatttctttcgctcccggttcttcgataaacgtcacctctccaagtccggtgactttcacggaatcattctgcacgctgtttgcgatatcaatcgcttcagggagaacgggaagccggagcttgtccttcccctgagacagccaaaattcgtaaacagatttagtcaaaagcaacggccccctttgctccggtataaatgtctttttgcagttcatcaatcagcgcctgtttgattttggcggcgaggctgtcggcgtcctgtccgttatggaaatgctgatcgccgctgaattcgattttaatttcttttgttcccgttttttgaacggtttgtccgccgcctttaacggctgcggaaaccgtgccggctgaaagtgccgccggttccgtctgggacggatcggacacttccatgccgagcgcctgagcggctttttgcagcagataacggccgcggatgccccgctcttcagggatgatccactcccgtttgttcccttcgccgacacgggcgatctgctccttggtaatcagacccccattggcataaccgacgtaagggcctccgtgagccatacttttaatcccggggacattgctgatcgagccgtatcggcttttaatatagccgatagcggcagcggcgttgtgaattggatttctgatatcattcatgcccggcgctttgtgatcttcaaaggtgctcggaatcgtctgcataagcccctgtgacgggtgtccggctttggcgttgctgtcccatagattaatggaattagggttgccgcctgactcatgctgtgcgatcgtcattaatcccggaagccagctgatcggcgtattggttgctttcattgcggccaaaagccactctttgacgcttcctcccgctgcacccatgccggaaaaggctgctgcaagcgagcctgcctgtttttcggcgtatttttttacgtcaactgagccgagacctttgacgacgccgactgaagcaaagcgcccgaggctcatcatgacacgggaaggagaatgaatatcaagctcttctctgaatgcgtcctcgacttttttcgccatatctttggccgcctgtttgacttcgctcccttttgcagtcatccctgatacgaagtgtccgatcaggcctgacccccagccgttcgcggaatctcttgattgcacaaacggtttattgatatgtgtgcttacgtattgcgacgttcccgtatcttttgcattctgtccggccgaatatcctttcaccgttgcggcgccccatgatgacgattgattaaccgccgattgataaggtgttttcacctttgtttttaaaaatgaatcggtgcccgtcggcgaagtattctgacctttcgcatagcccgcaacgacttgctttccgtaaccggatgaagacgaaatgagggcattgaacggcgttccgatgtttttttccttccagccgtccatatccaccgcttttttgctgattccgctgtcaaagccttcagtaaactgtttgccgagtgatgaagccgtcccgccaagtccggatgtctctacagacgctgcggccgatacagatgcagaagaagaaacaccgcccgctcccgccggaacagcagaagactgagccgaagccgcgcccatatcatcgacaacacgcatgccgagcttagacgcagcttgtgaaagcagcatctttccgcgtccgcgattgttgtcgacgggaatgacaaattccttaccggcttcaccgatccaggaaatggtcggctttgtaatgtagccgcctgtggcgtttttgtccgtttttttctttttatctccgccgcctcctgtgacaaagttcattatgcctgaaatcattttgccgccggttttatcccaaatctttttcacccagtcgaatgctgcagaaaaagcatctgatatggccgttcccacttttacaagaggttcttttatatgtttctcaaaccagccgcttaaccctttccatatattctttaccgtatctaaagcagtcttgaaagcatctgatattcctttaccgacatttttcaccatgtctttcaccggattccagacagtatccatgaaccagccggaaaccgtactgaaaacggatttaattttatcccaagctcctgtgattttactccaaatggacgtcgccactccgacgacagccgattttacggggccccacaccgtgctcataaaccagccggatactgtgctgaagacaccttgaatcgtcgtccacgcattcacgatatttgaccagatgctggttgccactccgacgacagccgatgaaaccggcgtccatacattttccatgaaccaggatgacaccgtgctgaaaatcccttgaatcgtcgtccacgcattcacgatatttgaccagatgcttgtcgccactccgacgacagccgatgaaaccggcgtccatacattttccatgaaccaggatgaaacgcttccccaagtatcttgtattgttgtccaagcactttgcgccgctttggaaatatcattccacgtgtctttcaaagctcctgaatcaaaggcctctcccaagctggaaccgcctaaactgccggcgatgccgcctaccgcgccgccgattaatgtgcccactccgggaacaacgctgccgattgccgctccggccgcggctccggcaagaccgccgcctgctgagccgaccttctctcctgcattatctttattgatgccggctaaatcagtaagtgataacaattcacctatgccgggaattcctttagcggcaccttttaaccctttcataccgccttttagcgcctttgaatctcccaagcctttcaaaagcgcgccgatgcctttacctgccccttttgttttcggcgtgtttacggatgcctgtttgctttcctttacggaggaacctcttttcgaggatttatttcgcccttcgactttactgcttttgcccctcgtcactccggtacagcagcagcagccccccaaagccccgccggtttttttggctgactttcctgaagattttggcgctgttaccgtgcgctgtgaaccctttgtcagatctggacgcttcgggccgttggagccgccggcagtaaggccgcccttactcttttcttttttcgtgccgcctcctaataatccgccgatattgagtttgcctaatttttcagcgattcctgaaaatattttttctattaattccccggctttttcgatgattttgtccgggctgaatttctcaaatttcttggcaatcttgctgacaattttatcaacaaatgcctcagcattttcgatgatcgcatcaggactgaatttgccgaactttttatcaatgcctccgaacagtgaggatgtaaactgctccactttttccaaaatcttatccggattgagaaaatcgaatttctcagaaattcggtcaatcgtgtcatttacaaattgttcggcgcggtcgattagcttatcaggactgaatttaccgacaacgtcgtcgactttcttcataaacgaatcagtaaaatgatccagctctttcaatatggtctccggactgaatttgctgacaacgtcatctatctttttcataaatgaatcagtgaatttatccagttctttcaatatggtcttcggactgaatttactcacaaccccgtctacctttttcataaatgaatcagcgaatttgtccagctctgctaaaagtgtctccgggctgaatttgcttgcgatctcatccacttttcccatgaatgaggttgtgaacttatccagttcggttaatatcgttgccggactgaatttgctcgcgatttcgtctacttttcccatgaatgaggtcgtgaacttgtccagctctgctaaaatcgtctccgggctgaatttgcttgcgatctcgtccacttttcccatgaatgacgttgtgaacttatccagttcggttaatatcgttgccgggctgaatttgctcgcgatttcgtctacttttcccatgaatgatgttgtgaacttatccagctctgctaaaatcgtctccgggctgaatttgcttgcgatctcgtccacttttcccatgaatgacgttgtgaacttatccagctctgccaaaatcgtctccgggctgaatttgcttgcgatctcgtccacttttcccataaatgacgttgtgaacttatccagttcggttaaaatcgttgccggactgaatttgctcgcgatttcgtctacttttcccatgaatgaggtcgtgaacttgtccagttcggctaatatcgtctccggactgaatttgctcgcgatttcgtctacttttcccatgaatgatgttgtgaacttgtccagctctgccaaaatcgttgccgggctgaatttgctcgcgatttcgtccacttttcccatgaatgacgttgtgaacttgtccagctctgctaaaatcgttgccgggctgaatttgcttgcgatttcgtccgctttcttcataaagcttgcagcaaatttatccagttccgctatgattgtttccggataaaatttggatgcgatgtcattgacttttttcatgaaggtgtctgcaatggagtcaagcattgaaaaatcgtatttcggcgaagcaggagcagcagatgcagaagcttttccgacgtccggcatattcttttgcattgcagccagctgtgctgtcaccttttcgtttaacgataattgaataacattgttttttcccgtcagcgaatcaatgcccgctgaaattcggccgactgttttcatgacgtgatctatgacgcgtatagtgacagagtacccgttctttaacgcagattgcatatagcgtttgatacgttccatggcaggggtcacttcgtctgacgcatacagtgaaacggtaaatcctttaaaaccggcagccagatcccgcaatctctcaaatgccgctgtcgcgctgtcttttgctcctattttaatggttaaagacgcaggcagacccgctaattgggcttgcaccttttgaatgacggcactggctccgtcttcagctgaaatagagatcatttgtgcgcccagctttcttttcatagagcgctggatgcggtcaattgttcttaaaacagatttactctctttgcgtatatcaatttcactttggcgttttgtcattttcctgtatttctcaagcgctctgaagccattttggattttccttattttctttgaaacccgatcttccaattcaaaacgggcggtcagctttgccatgatgtcgctccccctttcttcgcttgtttttcaagaatgtccagcttgtaaccgattaaaccgtacaacagcgccttaaaatgtctcggtgcttcatataactctttcagttctgatggagaataatgaagctcatgcatcgcgtaatagagatacacggcttccttattcccatcttttatcagttttttgcttcttgctccagatcttctaattcatcttcaaaaccgttgatctcaatcgctttattcagccaatttgcatactcaccgccgactgaaagcacgcgttttgccacctcgaccggatctgccgttttgtaagcgtcgcggagctccttagaccggaaatcagggtaaatcgtagattcaaccgcgatccgcgcataaaagcgctggctgtctaagtcttttactcggcctctgcccttcacatttttatatgtcgtgctttccttctccagttcatcaatgcgctcagtcgtaatggctttaaaaataaaaggcacgatgtttccttttttatcgacaaaacgctttgaaagcggaacccgaatctcctcagcctcgactgttttacccggcataaagaatgacagatcatatacttgttcgtttttttcgctcatgatgaaaactcccttactcttttttttataaaaaacaggcctgtaaaaaggcctgtttcactcataccgatcttaattaaaacgtttcagaaagcttttccggcacatcgaaatcttcaaaagtaaacggcacttcttcttcgagtgcttctgagtctacgtccagtccggcgatttttgcagaatcaaagttgacgtcatacagagtgacgcgttctgttccgcggcccgatgatttgtcatcaagaacggcttgcagcgtaaaatacgggtcgctgccttttttgacgtaatccatcataagaacggcgaatttggatgtgaccttatagaatgttgccgtgcccgttccgttggcgcctgttgttttatgtcccgtcatgcggcggcccatgatgtttacttctgatttgtttttttccacgtttgcttcaaacgttttaatatgcgccatctcttctccgtcgagaaataaacggccttcttttcctgaaatcgtgttttgcgcttttaatgccatcttagtttacctccacgttaaagtagaatttttctgccgcatccacaggctgtacggcgagatcaattaaaaagccgtcgcggtcttcattcagcccgattgtaatgtctttgtctgaatcaaagttggcgatgccgcccgcatcctgaagcgtagtcaaatattgaatgatcatcgttttaacgaattgaagaccgtcatttgtcgcaggaagatcgctgcccgtgccttttttcgatttaattaaggctttcagttcacgtgtcaaatcgttattcaccgcatcaagcacacggacgattttgtttttcgcgaactttttgtttttctctgccgtaaatgtcaccaatgagttgatatctttttcaacgctgactgacttatcacgggcatcataagagaaaaggaattcacctttggaaagacgttcgatcacttcatcatgagtcaggcggtgtagcacatcgacggcgccttcgtattcaacgaatgttaaggattgattaaatgcggcgctggcacttgcgcctgccacccaggcggtcgcatcttcagctttaatctcggttccgtcttccagcagcacaccttcagtcacattgataatgccttcataatcgccgctgtaatgggcggtcaccccttgcactttctgtccctgcgcatcgcgaaggcgtttaatgaatgcggcaaatgtcgctttcagctgatcgttttccgcgacaggaagagcgatgacatcgaaattctccgtttcagccgcagctaaaaaatccgtatagtctgagttgaccggtgctttatcagttccgcccgcgagacggatgcctgcctgcgggtttaacgtttccccggattcttcctcagtgcctgtcagcgggatggaagccgacagttcgcccgttcccgtaaatgtgacatagccgtttgcttttaattcttcggcttttttcaccgtttgtttgtcaacttccgcttcatccatgtaagtggtcacatcgaaagcggtctgatcaaggacgttttcactgatgcggatgatgatgtcatttccttttgaaccgccgtacaaagcggttgctttaacaccttgcgaaagatcggcactcgctctgattccctctgtcagacggtacatcaaaacggtttttgctttctttttcgcctcacgaagcagaatcagtgacggatcttcaatactgagccccacttttttattcaaatcttcaatgcttgaaatggaaacgaatgttttcgcttccccccagccggatgcgacgggaagggcgacaatcccgcgttcaccgatcgatacccgctcctgggcggttgttttaaagttaaaatagattccggcacgttctttttcttttccttgcgtaaatgttccgccgttcattattgcatgacctccttggttaaaaatgcttcaatgtaagacttggcttgcgcttttgtcatttgtttttgcttcacgccgaataaagccccctggagaatctcaggttttacgccgaaaagctccttcgcgtgctttgttaaatccgccgtgtcataaagaaccgctcgttccgccgctgcggcatttttctttttatgttgtttcacttttctttcaccccgctgttaatgtccacatcccgcagtgcgggagatgtttgtttctgatagtagtagcggctcgtccagcggattgtgatcactgcctcgcctttgtctccgactcttgtttcgatacggctgatgcggacgaaatcaccggtatcctcccctgattccgtaagcagcggaatcagctgtcttgattctctcaccgcatcggcgatccggtcggctgcatagagcgcctgcaccgagtcggcatggaacagcttcacattcagactgtacgttttcttataagtggagactgtatcattttcgtcaaaaacaaatgggggcggaatgtatagtgacggcacctgaaattgttcaggcagttcattttcatatacgggcacgccgcactgctgatacaaaaaagcggcgattgaaccggtttcgcgattcatccgatatctccccccaacgtgttaagccactgattgaaacgcttgtccagcgattcggcgaagagtgtttcatacaaaagaagggctttgtcccaaaacccattcccgctgatccactgttttttgagcgccattcccgttgaagctgacggatcatagatgaaccgggagccttgaaaatacccgggcacccatctgacattttcatctgagacggtccaatgtccgtcatttatgaatgaggcatactctacattggtgccgatttcaagggtcagtcccccgttttcaatgatccatacatgatcctgcgctccttttcggaaagaagacagcaggttttctgtttcaattcctcccgaatgaataagctcctcccttaccatgtcgagaaaatcctcccctgactgttccagccatccgcctgcctgacgggcaaattctccggatgatgccttttgcagcgaccgattccattgttcaaggttttttatgctcatagtctgtcatctctcacagcgataacctcccaatggtgctgtcttgctttcttcggcatttccagaatatacgcctgtccttcccaaatgattttgtcattgacacgcacagcggcctctttcggaaaatgaacgagaaaccgctgatataccttatgatcaggcgcaagctgaataagctgctgctgtttttcaacaaacagacacggcatgtcttcagcgtcgggcacttccggataagaaaagacaggctggagcttttcggcgggaatcccgaagcgtccggccttcggaactgacaccgtctcatgataaatatcgcatctgtcagtgagcagccgttcgtagctcataaaggtctcacctttgcgtttgcagaaaccggggaataacccggcgtgatatattcacagagaagatggcgcaccgccggttttcggattccgccttcacctgccaccgtatacgagtagtcgcctatcttttcagattgataggcggaagcggctgcttcattctggttgatcagcgcaaaatattgagaaagctttaataacgcaagcttaatcttttcgggaagcggtgagtaaatagggtcagtgaacgaatgccccgccattcttgccgcttccgcctccgcctccagaatgtcctgtataagaagcggctccggcctgtttttgacttgatcataaactgaatatgaaacaacgtcagacggctgaattaacataactgccacccccgtcttattctttaacgtttacgattttggcgcttgcatcttcttcttcaaatttgctgtcaagtttagccgtcagtacgataataaatttgcggctgcggatatctttatctacttcgattcggatattccgtgaaaaaccgagaatgatattttttgggtgagtcaaaatgatgtcagacgcatcgtattgggagtcaccttctccgaccgagtacggctgcagattggacactcctttgaccggaacgccgaatgctgaagacaaaccgccctgcaccgcaagatcccccaggttggtctgacggtcagccacacggtctttccattcaatctccatgccttgagatgtgtaaaatctgaattcctgaggcaggcgcaaatattttgccggaatggcttttaagccttttttaaatgtggctctggacagctcttccccgtttccgtcaatgacgtgagatacagtctgcttacggattccgtcaagctgtgccaagtacggatcagaagaagatgtatcgccgtttacgacaagctcctcaatatcgactgccgcccgctccgccaaaatctgcatgatcgtctgctgcaggccgtctttttctatattgttttcaagcgtgtcataggtgatattaatttccgcaatgacttctttcgtattcagctgcaccgtacttgttgccgggacggtcagctgatcgtcagttaaggcttttccttcctcagcggcacgcagaatccgctggccgaaaccgattttttcaaatttctgcgagtcattttccatttgaatcacacgcgattcgctgaaaatggtcggcgtgttctgcaccatgcggataaatgctgaagcttgtgcggggttcattaaaccgccgctttttaaagcggaaagtgacatttccgcctttctgatgatatcttgatttctcactctacagttcctccttctgactgggcttaaagcagtccgctccaaatggattttttaacaggctcttggccgcccgtctcttcttccggctgctttgatgcgcctcttactttttcaagcgcttcaatgcgtttaataatcggcgcgagcatgtcctcaacaagcgttttcagcttttcttcatcagacggcgcagccgccccgtctttgtcttccgtgttttggtccaaactgtcaagccgctttaaaagcgggtgcagcgcgtgttcaatcgattctcttacgtcttcttttctcatcttgttcaagtcctctcccttgcggtttcttgatttgcggtcacggtcgagaaattgcttgaccgcgccgaataagccggcttgcttttctgccggctcttcgtaaacgtcagcggttcccgccatgctgtagcccgtaatgataccggctttaatctgatcccatacttcatcggaagctttggtgacaagcacccaagatcctttccggatcacagcattcccgatttcaaagtcatccggggcgacgtacgactccaccacctcgccggtcccgccttcaaaattatgatttgtatcgatgttgcgggcgtccgccaaaaaaccgtgagcggccttttcaatctcttcagccgtcatataatcgccatgggcatccgggacatccggctcgtaaacgatgccgtaaacaagcttctgctcatccgattcgttttttgtaaacacctgcacctttttttcaaatgacggaaggcctccggctgattttgtaaaaaagaattccgtttggttcgccgccttatcgacatagctcacaaaactgatgacggcatttctcaattctctcggcacgagatgttttcaccccctttcaggattgctcctttttccctttcagcaccggccggctgtagtactcttcaggccattcctcaagcgtcttgccgagcactcttccggccagatcacggaggtcattaggagagaccgcgccggcggaaataaatggcgtaagcaccttcgcaatttcaagcggatcgcgaaaatcaggcccttttaatgtgagctgtacatcgtggagacccagttcaggcaaaaataacgtgttgagcttattaatcagcgttttccgctccggctgaaacacctgctcctccgttattttccgtgccgtatcggcggtggctttgttgtattcctgcgcctcgcccgtataaagcggcgggagacggaaagcggaacggagtttatttctgcttttgtcgtcatattcaagaaacagcgcatcatcctgcagaatttccgcaagtgatttaatttccacagacacgggcgtaatgtcttcgcctccgtgaaggtctttttccttcgcaatgccttccgcctcaatcagcagaaacttgtgggcgttttccaccccttccaggtcattcatataatcctggagctctttgtacgatgcttctgacagcatgccgttttcaaccgtaatggcggccggcacgtgacggccctgcttgaaatacataaaattcagttcttccgctttccgggcgccgtacagattgacgatattgccgacccagcgcggaattccgtaagtgccgctgccgatttttaagtgaatggcttcatttgcccggtattcttcagacagggtctttacgtattcgccggttctcatgtccatcatgcgggggtcgccgtattccttaaaaaacactttccgaccgttcagcatctgaacatatttacggaaccgtttttgccttttaatcgttttggatgcgccgttttcttcatatgaaaatgtgacttcaacaggatcagtcacaccgcacacgcgcatatgtttcacatccagatattcaatccccgccggttttcccgccccgtcccgaagcacttcgagaaaaccgttgcccgttttttcacggtcttctatcgcatatccgaggatcgtctcggccgattcatcaaaatgaagacatttgtaaaagctctccagcttcatccagtttttttcggctcgggccttttttgacggggagcaatccgggctatttacatcaaaggtatattccacatcaaacccaaaacccgtaatattgacccgatacgcgtcaatgcactgctgaagaatcgtcgagtattcggcgattgttttcagttcaatgagattatagggcggtgaaatgatgtcttcgccgtacagatcggcaaattgatcttcgttcatctgccttgcctgcggcgcggccatttttgatttaaagacggtggctctaacgttttgatagttcggcaacgcctacctcctcctttcccgattcggacgtctccgtttttgtgatgcatctttcaaatccgccgcgtcatagtcatccagcgcataccaaatggctgaaagtgtgtggggatcaattgaaaactcatcttccgacagaacgccgtttttgttttttgcgtacgttaagttctgcaattcgcggatcgtatgttgacagctgtctgagcaatagatgtgtttgaaccgtttcagtttttttgtatactgaagtcttgagcccggaaactttttggccgcaaccatgtaaaagccctgcctgcgaaaatattggatgcttttcggctcagccgaatccgctttgatcagctctttttgttccgccaattcctgaagctcctcagctgtctgatcatcggtcattttgtttttgtaatactcccagaaaatataaagctctttttgatccggatcgacggcaagccggatgaccgcattgtatgactcttcaaatccgaaatccatgccggtccgaaacagggggcgtctgatggaagcaatccgctccgttacttcgttgtgctccatgacctgaaactgcggaaacacgcggatgccattgacgccgaactgtcctttgcgggcgatccggtataaatcgggatcgtaatgccgtaaactgtccagctgcttaatatagcttttcggcaaaaacagattatcgcacgctgtggaatggtggtaatacgtatctcccttaacgacggtgcctttttcatacagcgtctgatcatccaatacgaaccgttttttttggtcatcacgaaaaaaatgccggtacgtccaattggaggtgccgacgggatttgtggtgcatatcatatgaagcgaaagctcgggatggcgcagacgcccgatcagctccttaaagccttcatacttcacttcagagcattcttcaatccaaatcagtgaaatatgatgaatggatttcaatttggccgggttgtccatccctttaaacataatccggcttccgtttgaaaatctcagctgcatcggtgaagacacggcctttacggcatgtcccagctcaagctccccgataatatcttcaaacaaggcaaaagtagaatctctgtgcgtatcgaaaacttcccgcacgacaagcgccgtccgcttttcacgaagcagcttcaggatgattttcagcgcggtatgatagctttttgacgagccgtagcctccgacgagaaattggtacgtttcattccaattgaacaaataatcttcaaagcgcgggttgaccgctttttcaatcatgaccgttcctctttccgcgtaatgacaatgtcaatcggcttttggctgtcttctgttttttccatcttctgctgtgccagctttaatttttcattttcgattttttgtttaaattgatcagggaaaaggtcaaagtacaaggacagcttttcaagagccttcatcttgtcggcaagcttgattgcaatgccctcttttccgagttttgcttctgtaacgatggttccgtccagaaggtgcgaatctttaacgtcaacgtagctgatttcctgcataatcggctgatcattttcgtcaaagagcggccctgattttccgaaggcctgaacctctttttttccgaaggttacataatcggtaatgtcggcgaaagcgattttcacatagacttgaagaacgtccatcgcttcgacaaacactttattaaccatttcctttttcatgcggctgatttctttggcgactttttcgttttttaacagcctgcttcccgtcacatgcgcgctttccggtgaatacccggcttttatcgcagattgggtggcgttaaagcttttcacataataaagacaaaacagccgctggcgttcgtttaactcatcaccttcgcccgggttgttttttccgccgctttccgcattcttatgaagcgcctcgtcccagcgcccttcttttttccatctgccgatcgttcttgcggatacgcctgatttgccggcaagggcgcgatttgtgatgcggcctttatgagactgatagattgtaaatgcctgttttctttttgcgtttttcatgctacggcatcaccgccacctccgacatgattgtctataataaaaagcggcttctaatcgggccgctttttgtgatcgtctgttcacttctaggtggcaaacgtatgacaacttatgaagcaggcgattgatttctttgttcctgctgtttttgaattttcagaagcgcccgtttgaccgtcgtctgtacggttgatttctttacgttcagcaaggcggcgatccgttcatatgaaaagcattccgctttgtggagcagcagcatttctttttctctatccgttaaaacggctaatgcgtcccgcagtctgattctgtcttcttcagtcacatttgcggaaggttcaaacatcagcgcctgcgaataggtttctatgattctaggatctttaatcagcattctctgataagcgtctcttcggtctatcgctcttcttatgccgggctgccggcctttttcaagccattcgatgacatattccacatctgtaatgatcgttctgatgatttttttatctttcagttcttctgaagtaagcaccgtttcatcggcttcctccagctgcttgtaccactttttcgtctctttcagcgtgcgtttatattcaaatagtaagtcttccatgcagatcctcctctttttcggaacaaaaaaaggacaccaaccaatgcgcagcatatacgcgattgatcagtgtccgcaggctttccgtcttggacgtattctgtttttttcgattaattcaatttaaagccgatttcatattcaacccgggccagatccccttttcgcgtttcgacaagcgttttgccgtgctccggcgcttcggcgagccatgcttccttcttcagtccgtctacaatgatgacccgcaccttgccttcttccagctggctttgtaatgttgtatgttcaatgtcagtcagttttttaggattcatgttttacgtcctccgtttttttcaggatgtttacttcatgtatgaggcttccgagctcatttatgaacgcttctttttcttcagaactttctccccggagcaggcggagagccgtttcggccgcctcaaaaagttccggggcttttgccatcaatgccgcgttgatctgctgagagtatgaacttaagttgaaaacggccgcgatgagccttccgtttgaataagggaacttctctttatccgcttcgctgtaagcggaataaatgtaaatgggtttttcttctccgctgtgtacggcccgccatggagcggggctgtgtttttcttgcaatggttatcctcactttccatcagcctcatgccatgcttcaatttgcttttctatccgtttcgccctgaacagcaggcaaaaaagccatttaatatatttatacacgtgcatcaagcctcgcttttgcgtcttgaaccattcgctcaagacgtttaatgaccggcgttaaatcagtgcctgttttgcagttcgggcaaggatgaaagacagcgccgaaacccgtttccgtcacaatgaccttcttcggcccgcacagcttacacattatctcgccccctctaatctgtggtttacgtcaaatgaattgccattaatgatgactaaataatcgctgcacatctcataaattcttgtgcccaaggcttcatcaacctgcaccagtccgtcacaggccagctcgctcgagattagaaccggcttatgatttaaatagcggtaattcacgacggcgtacatttgttcaatctgccaatcggtcgcccggggttttccgttcagcggtttgaacagatcgtcaataaaaagcacatccgcctgtttcatacggccaagctttgcatcaagcagatcaaaatcattttttaaatccgtaaagccctccacaaaaggaaaatacagcacgggtgtctgcatctgtctcatgacataattgctgagagcggtcaaaagatgggtttttcccgaccccggacgccctaaaagggcaatgctgtttttccggcagtttttaatcttgtcgaagttttcaacatattcaagggcgcactcatatgcgtcgacgactgcctgaggcttgccccgcgtgataaatcctttgaagtccagcttccgaaaggcgcctgtaatctcacttgcgctgaggatgcgctctgcttttcgttcggcggcgcagcggcacttaacccacacatccattcccagctggtttttgagataaccgccctgatctttacagagcggacagtcaaagcggctttcgtctgattcttccggtctgtccgccagtaatggacgttttccgtttttcaggtcggccagtatctgctcgatcgttcgttttgtcatgtatcgtattcctctctttttttgttgtgattgtccttcccgcaattcgtgcattcaagcggtcttccatatacttggcgcaatagctgaaagccttgatcgtttcagctgaagaggtgcgccgctgttcaaaagcggtaaagcattcgccgagccatttgattgcttcttgtgctgacgcaccgagggaaacaatacgggcgatggcctgataatcccggggcgacgggtatacgctccgcccctcctgtacagaccttaatctgataaaatgggcggcaatgtcgttaatcgcttcttcagcagtatgattttttgttatatctatttctctccggacatttttgtcccggtgatccgccgatattgtccggtcagttgcttctgggcgggtcaatgtctttttcggcgtgaatcttttcgagtgctttacggagacgatgagtccgtaaggggcgcggacggttttgatatattcatgctgttccaaaacctcaagccaccgtctgacggttttttcgctgacggcaaatacgtcggccatttcttttgcttttaagggcttatgaccgaggacgatcccccactttacgccgtcttttacgtgttcctttgtcgttgagctgatgaaccataaaaacagccaaatggcggatcctattttgtcataatgttctgaattcagtaatccggaatagatgaaaaatgggtagcttttacgactcataagggacgtctccgtttttcttcagacctatatagcgttcatactgcaatcggttatcaaatcggaataccggaagtccgcaagcggtaaaagatatcgaaccgcctgcttttcctaaacatctctggtcagccggattgctgctgaaacggatgattatcggcttcatctctcaccctcctgatcaatttcttatcgtattttgatacatttcgtatccttatgatgttgattatatacgatacttttcgtatcatcaagacctttttgatactttttttatcatctctttattttgatacattttgtatctataatcataagtaacttagggtgttgaaaaaagagaggtcattcggatgataggcggaagattaaagagtctcagaggaaagaaaacacaggaagaagtcgcaaatcatatcggtgtctcgcgcgccagatattctcattatgaaaacggccgatctgaacccgattacgacacgctgcaaaagcttgcggattatttcaaagtgtcgactgattatttgttaaccggaaaagaaccttcagatgaagacatgtttgccgatcccgacctgcagatcgcatatcgggacatgcaggacttttccccggaaagcaagcagcaggccattgaattcattaattatttaaaagaaaaagagaaaaaccgcaggccgaaacataaataatccgctcttttcctttaaattgcttaacgttcagccgatataaaagctgaatgtttatttttaaaagaaaagggaattgattcaaagtccgatcagggcttttctttctcgcttgaaaaagaacatatgttcgaaagggtgtattcaattgggcgattttttaacacatcttgaggaatacgtcaaaaacttatattgccgcatgggaatgaccgcccctctccatattgatatgcagatgattgccaaggagcttgacatttggattcattttgaagatacgcacagtatgatgctgaagcgggacggcatgtacagcatcgtcctgaatcaaagaaagtcacccgaagagcaatggcaggattttgcgcacgaactgtgccatgtgctgaagcataccggcaaccattttcatatgaacaagctgttcagggaactgcaggaatttcaggccaaccattttatgtaccacttctgtgtgccgacctttatgctgttaaacatggagcttccccaacggagaagccatgccgttattttaatcgcagccgctttccgggtgacggcatcatttgcggaaaaaagactcgagctgtttgaacggcgtaaagcaggtattcaatttcagaagcggctcgcttgtctgttatccgacaagcggccgaatgtgtattatgaaagcggacagacacacttgcatgccgctgaagaaaaaacgccgtattttattgaaaattagcgattctccgccggcagagtgtcagcattttgacatcggaggaagagtattgtgaagccacattggcgctggtttaagatgaggcgcagatgcgaacgcgaccggggccgaaatatatctgaactcgccccgtccgtcaaaggcttcaccgcgggcccatcttccttgtgaactctcatctcctctggaaaagttaaacaggtcatacgacacttcctgcttttcgagttcacgcggaaacgtcacaggtacaacaatgtcccgttctctttcttccagctcttttatcgccgcataccacatattttgatgatacgtatctcttgcaattaaaaaggacagcatatccctgacacccggatcgtcagtcatcgcatacagccgggtcacctgaagacgtccctgggattccgcatttaaatttgcccgaaaatctgcaagtaaattcccgctggaaataatgtatttcgcattccaagggtatccttcagcgtcagccgccattgcgcctaaacctgcaacaatggcgtgctgcggattcatcccccccataacagccgcgacggccgggtcacttttataggcgttttcctgcacatcagccggcgcatcgtccaagagccttgaaatcatcgtcgcaagcatttccacatgcccgatctcttccgttccgacatcatgcagcaaatctctatatttttcatcggcacggcagttaaagccttgaaacaaatattgcatcatgacgctgatctcaccgtactgccctccaagcacttcttgaagctttttcgcgtaagccggatcaggacaagacggctttgcgcggtattgaagctctttaatatgataaaacatactcattcccccattctttcaaacaatcttagtgtatgaaagaatgggcaggcggtgcgagtccgtttcttcactcataaaaaccggccttcacggcttctacataccgaaaaaacagatcggttggcgtatatttttctccccggcagccaaaattgctgaacagcgcgtgtctctgcaccgtgctcacttccaattgcagccccattttcctttttgtccgattgacaatgttgccgggatttacacctgccagccgatcattcttctctgtcagctcggcatcaaatcccgcttcacgcagcagatcacaaatcagtcttgctttttccagatccgcgcccccgacgagtgtatttgcctttttcagatcatgatacccatgaaaagccaatccgtaatgatgggcggtcactttttctaaagccaggggttcgtcaaagcgtgtgcttgtcaaatggagagaacggttatcgcaccgcttcgttccttcaaataaataaattgagctttggtcagaaaatgcccgcaccagctcactgacacccggctcaatcctgccgccgtggggagcgaggacgatacatttacttccctctttttcttcataaataattctgtattccgattcagcagcagaaagggctgcgaaattgtcatatttatctttcatgtgtagcatgctctccttttccagtcagcaccagtttactctactcatctgggaatggaaacctttttatagtatgatttgatagaatacgtatcagggggggatatatcatgggattcatcaatggattgctgggcaatgcgtcgacaatatcgacggctgaagcaaaagcagaactggctcgtattctgctggaaggtgagaatgtcaacgccgcatttaagctcgtccgggatatcattgtctttacggataagcgtcttattcttgttgataaacagggactcacggggaagaaaacggagattcaatccattccgtacaagagcatttccagattcagcgtagaaactgccggccgctttgaccttgattcagagctgaaaatttggatttcaggcgcggaacttcccgctgtctcaaagcagtttaaaaaagatgaaagcatttatgatattcaaaaggcccttgcagcagtttgtatgtaagaagaaacggaagcccggggagcttccgttttattgattacagtttttcttcaattttcgccttcgttttcgggccgtaaattccgtctgccgttaatccgctgacggattgaaaacgttttacggcatttgccgtcttcggaccgtaaacgccgtccgccccatgattttttgctcctttatcgggataaaaataaagagcggataaagcgttttgcacttgttttacgtttgtccctttcgtcagcggtttcgtcactttgatcacaccggatggaagcggataggaagacacagcctgactttttgaagaagaacccgtctgagcgagcttgatcacttgtccgactgtaatgtgattcgggtcggtgatatggttgatgctttgcagcgattttacgctgacaccgtgcgatgcggcgatttccgataaggtgtcgccttttttcacatggtattcagacgcggaagaagcaatagaggcttttttcgccggcatactcccgcttaatttcttttcaatcttcgccttcacttcatcccagcggccttcagacaaaatgcggtgcgggcagtactttccgttccagtcctgatgctttctgattctgtcaatcccccagccccgttctttcaaaagctgcgccgcaaacgcaatcgccagttcttctgcggctctgtaccgttcgccgcctgacttgctgtaacagatttctatagcaatcgactttcggtttccggtaccgttcgtgccgtctcccgaatgccaggcattccggtccaacgggattccctggatcacttctttgtcatcaaccgcaaaatgatagctcgttgattcgctgtttcccgtcatatagctgatttcattagcggcggatgcgtcgtttgccgtgttatgaatggtaatatactccggcgtcatcggattcggacattttaacgcatatttatcagccgatacgagccgttttttcacttcaatccccactcttcatctctccttatgcctttttcatcaataggtggcattcgtaggacagataacttgagcatatagaccctgcattcggataaaaatggaatggatacgcatgcaaaaaataagacccttccaaagaagggtctttatgttatgtttggttgcgcgcggcaatatggaatgtgccgtccgcttggttttccaaatggctttcatggccgatcacctgtgtaaagctgaatccgacagcaacaagcagcaatcctgacaacagtttagatttcatatagacaatctcctctctggatttgtttttgggcgtgcaccattttttcataaaacgtgagcgctttttcaggctgtccgtgtttcatgtaaaatttggcagcatcatgcgccaattcttccacatacggatacagcatgtgttcttccagaaaatcaaacgtgtgcctgacggatgcgttatccatttccttgccgtataacgcatgtaaaaattggaacagattcacaaacaattcatcattgtattcgcgggcgatactgagcccgagacggtattgcttctctgcttcggctgtagtgttctgtttataaagaacctgtgttaatgagtaaatagaatgcggaagattatcgaacttttctgacctgcaaatggaaacggatgtctcaaaatattcggctgctttagagaggtctcccattttttcgtaacagtttccgagattatataaggctgaactgataagacggggattgccttcttgttttgcaagatctaaagcaagttctaagtggggcaatgctctttctggatactgcatgtcatcataattccctgcaataacgaattcacattggattctgcggacgttgtacgtctcatacgattggtacgtttcaagggcttgaacggcataactcatggagacgtaggtttgtttcaggttgtaaaatatctcggccattttaaaagcaaactcagctttctcgatgtcatcagaaacgagtgcaaggtttttttcagcccgtttgtaatacatcatggcgtttaggaacattttctgtttaaattcgtacattcctcgaaaaaaattaaagtagtaatcaagcagtcctgtcagtttatactggttgccttcaatgtcttccaataattctgaaaactcaggctgagaagggtcctcctttaagggcttgatgtaatccagcatgacacggtgtctgaattccattaatgaataatacagcagcagatcctgatcttcttccatatcctcgatctctctctctacttcacgtttgacgcgctccgcctcaagaacgtgaaactgccggatatgggtataccattcattaattttgagcccgacaaaagaggacggaatagtctgcttcatcctcaataaatccccccttttggaatgaccgagatatgtcatattttatcatatttgctagaaaaagaagaacgcaaaaagaccgcaattgtcgaatttcggatatccgcaacgatttatctccgtcacaagcttattgcttgtttcttccgtgccgttgatatagcatatccttgcagctttttattctgtattaaatgggggttttcacatgacagcacaaaatcagttggtcagccactttctgtcacatcgaaacgtaacgattgagctggcggaaaaaatcagccgcgaacattacgattacaagccggcagagacatcaatgtccgctcaggaacttgtaaaacacatggtttattcttttcttatgtttgcaaacgtcattaacgacggaaacgcatcagccatccagaacaaaccgaaagaagaagcagaaacagacctcgtcaaactggctgaaacgtgtactgaaaaaacgacaaacatcctgtcacagctgacagaagagcagctgaaccgcgaaattgacctgaccgcctctttcggcagaaaagtgaccggcgcggctctccttcagcttgccatggagcatgaaattcatcataaaggcaatcttttcgtgtatgtcagagaaatgggccacacggaacttccgttttatcagcaaaaatcataatccggccatccgccggtctgcgacataacagcaggctggcggattttttgttctgcataaaattttccgaaaatttaattgattaccgcctcttaatcatatataatctgataaaaatagtaggattattcaggaggcacacagatgactgtaagcattgtgtttatgggtttctttgtcggaacgcttgtcggattgacgggtgtgggaggagcagcgctcttgactcctttactgatcgttttggggatcaacccctcaatcgccgtcggcactgaccttttatataactccatcaccaaactgttcggtgtcgtttctcattggaagcagcgcaccgttcaatttaaacttgtcggttacttggcgctcggaagcattcccagcgcaacagccgccatcggtgttcttcacttgtttcccgcttttcaccagcatcaggagcagattatcaaacaggcgctcggctacgtactgacccttgtcgccatttccattatcgcccgcctttttttcgataaaaaactgcggccgaaccgctggcagcaaaaaacgcttgaagaaaagcggacactcatgatactgatcggcgtcattttcggcttcatcgtcggcctgacatctattggatccggctcattatttgcgatcgccatgttatacctgttcagaatgaaaacggcagaagtggtgggaacggatatcgcacatgcctttctgctcgtaactgctgccggtctgttaaacgcaagctttggaagcgtcgattacctgcttgtattgaatctgttgatcggctctgtgccgggtgtgcttctcggcagcttcttttcgccgaaattctcaccgcgccccctgcagtttgtgatggcggcgattattttaatcagcggaatcaaattaatataaaaaaggcggtctgttgtcagatcgccttttcccttataacgtcacaccggacttaaagattgcaagctcccgaaaatcgtttttttcgttattgacaaattctccgcttgcaactttaataatgtattgtataaaatctcttacaatgtgatcttctgttgtttgttcttccgccaatctgcccgcgtcgtaatcaatccaatgaggctttgattgaaataaatcggtatttgttgatactttcacagtcgggacaaatgtgccgaacggcgtgcctcttccggttgtaaacaaaacgatgtgacagcccgccgcggcgagcgctgaagaagcgattaaatcattgccgggcgcactgagcagtgtcaatccctttgttttcagtgtttcaccgtatgtcagcacatcagaaaccggtgcaagaccggctttttgggtgcagccgagcgacttgtcttcgagcgttgaaatgccgccttccttattcccaggtgacgggttttcataaatcggctgctcgtgcttcataaaatattgcttgaaatcattgatcaatcggactgttttatgaaacacttcttcactcgccgcgcgctgcatgagaatcgtctcagcgccgaacatctcaggcacctccgttaagaccgtgctccctccctgtgcaatcaagtagtctgaaaatctccctaataaagggtttgccgtaatgccggaaaaaccgtccgacccgccgcatttcaatccgatgctcaattctgacagcggaatctcctcacgtttatctccctttgccgcaaggtgtatttctttaataagcgcagtccccgcttcaatttcatctgtgacagcttgtgattcgagaaatttcacccgatctccgttcacttcagaaagggtttccctaatcgccgccagctcattattttcacagccgagccctaaaaccagcacaccgcccgcatttggatggcggatggcgtttatcagcatttgtttcgtattctcatgatcatcgccaagctgggagcacccgtattgatgctttaaaaccagcacattatcaaagggagcgatgtctttcgtctcttttacgaagcgctgcaggattttctcagcgacgccgtttacgcagccgactgtaggcacgatccacagttcattccggacgccggatgtaccgttttctcttctgtagcctttaaatgtccggttctcatttgtaaaaggattgtcctcgaagcgcggtgaatacgtgtattcttgcacatcggataaattcgtttgcagattatgggtatgaatatgctcgccggccgaaatccgccttgtcgcacgcccgattgaaaaaccgtatttaatgatgctgccgttttcttcaatggtttgcagcgcgattttatgcccccgctttacaggatccttcacttcaatcgtcagtccgtctgtatgcagccgctcccctttgttaaaatggcgcatggcgagaagcacgttatcgtttttatggatttttatgacctctttcatttcacttcccccttttttccgcagcattcatgtaacgcctgcttcataccccgcttatgaatgacagacagaaaaaaagccgttcgttcagtcagccccggaagatgattcagattcttcccccacaatcgctcttctcctaatatggcagatgccgcttgaaacatatcatctttgcaacgggaccgcgccatttgaaaacggttaagaacctcctcgccgtctgccggtttgttcggtccgttccagtatgaatagatcatggcgctaaacgaaaataccagcttctcaggtagccggccctcctgttcgatataagccttcagcgtcggcaggtttcttgttttgaatttcgcggcggcgttaagggtaatgctttgcagataatggtggatataagggtttttaaaccgctgtaacacgtctgccgcgtattgggtgacaccctccatttgcagcacagggaggatttcttcattgatcagctcttcgatgaatctgcccgtcacctcgtgctcagccgcttcccggacggtttgcagtccgtatagtaaagccactggcgccaatgccgtgtgagcgccgtttaagattctcaccttttttgtcctgtaagacgtaaggtcagacgtgatcagtgcgttcagcccggcctcagcaaaaggaagctcattctgaagctgttccggcccttctatcacccacaaataataatgctcaccaaccacaagcagacggtcttcgtatccgagaaaatcggtaagttcttccgcggtatcaacaggaaatccgggaacaatccgatccacgagggtattgcagaagatgttcgcgtcatgaatccattgagtaaaatcaggttccagctcccacagcccggcatattgaagcacggccgccttcagtttccgtccgttttcttcgaccagttcacatggaagcactatacaccctttctcggcgtcacccgcaaatgccttatagcggaaataaaggaacgccgctaatttcccggggaatgttttttgaggtctatcctcgagccggtcgcctttctcaaacgtaattcccgcttccgtcgtattggaaatgataaaacgaagctcctcttgtgctgccagccgtttaaaggaatcatagtcagaaaaaagatcaatgccgcggctgatggatttgacgatcatgtgttcttcagccggttttccgtcctttatcccctgcaaaaaaagcgtaaataaaccgtcctgctcgtttaaacgtttgattttctcagagcctctcggctgtacggcgacaacgcttccgttaaaatccgtcaattgattcaattgatcgatctgccagtcagcgaaagcccgcaaaaagttgccttcaccgaactgaaggactttttcaggatattgaatgtattcgccgcacatctttttattcagctgctgcaagctgtccgcctccttctgtatttatgcacacgttaacatttctccgtgtgaaaacccggataatcagacgggccgttatgtgagttttttaatggaatctcttatcatcacctcggtgttttcgtatattttttccgccgccgtatccgggtcggcgattagcgccaaaatcttctctgcgccaagtatgctgatgttttcaaccgggcgttttactgtcgaaagcctcggcgtcatgtattgggaaatgccgatgtcatcaaacccgataacggatatatcttccggaacgttcaggcccttggcgaaaatggcgttcatcgccccgatcgccatatcatcgtttgaacaaaaaacagccgtaggcggtgattgaagcgccaagagtttttccatcgcctgactgccgctttccatatcatagcggccttttacactgtattcatgcttaatcggaatagaatgatcaattaaagatgtcaaatagccttctttccgctgagaagttgacctgaatccttcctttccctcaatgatcgcgatatctctgtgtccgtttgcgatcaggcagtcgaccgcctgtctggagccttctttatcgtttgacaggatattcgtgatgctccggtcatcaatatcccggttcagcacgacaagcgggatgtttttctcgcggatatgataaataaatgaattatcactgtcgctttggctcattaaaatgattccgtcatatctcatgggcgtaatggtttcaaagcttttcaggtcgtcaatcgcgcggacgaacaaattgtattcctcactgattgtgcggtttacacctttgatggtatcggaaaaaaagctgtgtgaggttccgtttgtgatgcttgtaaaaaacagtccgatcgtatgggacttttgcatggcaaggctttttgcatttacattcggtgtgtaattcagctgtgaagcgagctctaatattttctgttttgtatgctctttaatgtaggggctgccgttaagtgcccgggatacggttgtgtgggatacgttggcgagttttgcgatatcttttatggttaccatcgtttttcctttctttctgtatgctgtcatttatttctattgtaccattaacggacagtccataaaattactaaagttaaggttttgcatgatgtaagtcctgaacgagctcggcatgctgccggtccgtcagtttatacattaaaccgataatcagcatggcgcacgctaaagcgaaagccgggtacagcagcagaagccctttaatcccgatcagcgtgccttttgtctgagatgcattcgggatatagccgataacgctcagcccgatgcctgaaagaaaacctgataaagattgggcgagttttctggagaagttgaaaagcgaatatgtcgtcgcctccttccgttcacccgtcttccattccccgtaatcaataatgtccgacacaagcgcccacgtaatgccgtttggtatgctgatcccgataaaagcaatgctcgctaacgccgtaaagataaatacgtttgacggcagacagaaattcagcgcatcagccgcggcgctgacggcgaaaccgatcatcaccgtttgcttttttccgaagcgtttgacgagtttcggcataaacaacacacctaaaaatgaagaaccgatgatgataaaactcatgtaggacatcagctccgcattgttgagattgtactgggcgaagtaaacaagcatagcggatttaatgttgtatgccgatattgagaaaatcgtcatgaaaacgacggtcagaagcggtttgttgccgataaagcatttgaaaaccgacatgacggacagcttttctttcggcgcttcacggacgataattctttctttgcagtttcggtagcagatcataaatcccgcgattccgattacggccatcattcccatgactgccgggtagccgatgtgaacgttatcaaaatgaacaagaatcgggatgacgatgacacttgtaatgagcagcgcgccgagggagcctatctggcggaatgcggaaagcgccgttctgtcctccgcatcctgtgtaatggccgcgccgagggagccgtacggaatattgacgaaagaataagcgatcccccacagcatgtaagaagcataggcgtacacaagcttccaggtgacgctcacgtccggtgacacaaaaatcaatacggtcatgaccgcaagaataatacttccgaataataagtacggcctgaatttcccccggggtccgatcttttttctgtagtcaatggccgagccgacaatcggatcagtcacagccgcaaacagcttgctgaccaaaaaaatactgccggcgaacgctgccggaatgcctgcgacatctgtgaaaaacttcagcaaatagatctgcccgagatcaaacataaatccgttcccaaaatctccaaaaccataggatactttttctttcagactcagcttatgctccttcacttttgcggcaggtgctgtcacgacaggcacattactcataggccacctctttcattccattttttaaaagcggaaatattcctcagcattccggtaacaaatcccctcgacaatctttcctaaaagctccatatcgtaaggcgcttcgccttgttccgcccagccgccgatcagcgtgcagacaagccgcctgaagtattcatggcggggataggacaggaaacttcttgaatccgtcagcatcccgataaaacggctgaacaggcccatgtttgataacgctttcatttgttggagcattccatctttcgtgtcattgaaccaccaggctgtgccgaattgaattttccccggtgttttcccatcctgaaagctgttgatcatgctggcgataatatagttgtcattcggattcaaagaatacaaaatcgttttaggcaattgccgctttttttcggcggaatctaacagccgggcaagcggttttgcgatacgttcatcattaattgagtcatatcccgtatcaggaccgaggctgctgaacttatttgtattggtatttcttaacgcgttaatatggaactgcatcgcccagtccagttcggcgtaaagaccgcaaagatattgcagcgtccgtgttctgaatttcttttcatcttcaaaagacacatgctctccgcttaatccggctgcaaaaatccaggccgcttcctcttcggtcgtctcggcataaaccatttgatctaacgcatgatccgacactcttcccccggcattgtgaaaaaagcggacgcgggattctaacgcatctaaatacgattggtaggtggtgacagccattcctgaagcgctctccagcgaacggacccaatcggcaaaacccgggctgctgatgtccagtcctttgtcaggccgaaatccgggcagcacttgaaccggaaaatcactttctttcaacagttcgtggtatgtcagcgcatcggcaggatcgtcggttgtgcaaatgactttgacatttgatttcagaatgagatcccttgcgccaaacccgtctccctgcaggagctcattcgtttttttccaaattgccgcggccgttttttcattcaatacgtcataaatgccgaaccagcgctgcagctctaaatgcgtccagctgtacagcggattgcctatcgccatcggcaccgtttttgcccaggcgaaaaacttctcttcatctgaagcgtttccggtaatacagcgctcttcaatgccgttggccctcatgatccgccacttgtagtggtcaccgtaaagccatgcctccgtaatcgttgcgaaggttttattttcatagatttcctttgggcttaagtgacagtgataatcaatgatcggcatgttttcagcatattccctgtacagctttacggccgttttactatccagtaaaaaatcatcacccataaaagctttcacactttcatcctccctcttaaaaatgttaacgttaacaaaatgattcttttttattttagcttcctctttctcacatatcaatcattttattttatttttcagaaaattgtatccgttaaaaaaagacactgccgagaaagtccggcaatgtcttctgtgtgatcttaagaattagtaagcgaggctgaataatcctttgatatgtgttaaataacgtacgttacttgcttctttcattaaagatgccggaagacctttcagcggagtagagttcgctccgatgatggcaaccgcgtctttacgtccgaggcttgcaagcgtaccagagtttacaggcttgaatgtttcaagcgtttttccttctaagtaagcgaacaggttgtaaccgacaagttcacccatctgccaagcgatttgcgctgtcggcgggtacggacggccgtccggcgcaaagtatactgcgctgtctccgacaacgaatacatcttcatgagaagtagattgtaagaaatcgttaaccgtcgcacggccgcggttcacttcaaggccggattcgccgactaacgggttgccttgtacgccgcctgtccatacaaatgtgttggcaacgacttttgaaccgtctttcagatcaataacgtttccttcaacatttgtaacaggaagacctgttaagaactcaacgccgcgtttttcaagactttttgtcgcgcgttcgataaggtcatcaggaagaacaggaagaattttcggacctgcttctactaatttcagtttgattgctttcggatctacgccgtattttttcgtaaggttcggcatgatgtcagcaagctcaccgacaagctcaacgcctgttaagccgccgccgccgataaggatcgttgcatcagcttcgtttttcgttttagcgtattcacgcacacggtcttccacgtgtttgtatactttgttggcatcagccgcagatttcagcaccatgctgttttcttcgagtccaggaatgccgaaataagccgtaacagaaccaagtccgacaacaagcgcgtcataagtcagcttagaaccgtcagaaagggcaacttctttcttatcaactgagaaagaattgacttctgcgattttaatgtcgacgtcttttcctttcagaagtttttcaagcggcatagcaacagcctgttcagacacgttgcccgctgcaaggcggtgcagttccgtaatgatttggtgagtcgggtatttgttcacaacggttacgcgtgcttcatctttactgtaatgtttgcgaacggttaaagcagaaagaactccgccgtaaccagcgcctaaaatgacaatatgttttgacatcgtatatcctccgtcctttatatcaatttgaatctgagattatttttgtttttcgttcatgatttcaagatagctgttagcaaaacggaacagcttttgagcttgaggatctttcagcatgcgcagcaggccgaaaagtccgatcgtttcattgcttgcatccgcgcggtcttttgcttcgatcgcagtagccgcaacttctttcgctgtttctttcaccggctcaagaatttctgtaagcgcacccactgtatcgctcttcaatacttcgtctgtcgctacagactgtgcaaaatcataagacttcgttaaaatatttactaactcagtcagttttggaagctgatccactaaaacagtcagtgattcttgaacttcaggttttagcagctgatcaataagatcgcgttggccttggctgacagatgcatttgtttgatcgattgtttctggcatatccgattctcctttactataagcagtatgctgatttttttggaaagggtagcctttcccccttcatgcagaaaagcatgaaaaagcaagattgtgaattcatgcacaatcatttacaaaaataaatgtttactacccagtttttcactttgccatatccagtattatttttatatcaacaaaaacaattgaataagtcaaaatttctttttcctctctgaaaatagcaaacataaaaaaccccaatttgatttactcttatataataacactttttgaacaaaatttgaacgtgaattgtttcgtttatgaaattatttatatggtgggggtgtaataacgtttcttttaggctatttttttacagaccatccgcttttcccctgtcatttttcccacaattttaatagcgggcccgtttttcccgtaaaggggtcgcattccgggagcgggacacggctgatttcttctgaagttctatcatttttctccgtttttgtatcgtactgccggccgcccggataagccccgatcacggtaaaatcagaactgcccgacagttttttatgtccggtgccggccggaatgaccgctgcgtcccccgtttgaagaacggcatccgctccttgttccccgccgaacctcaaaaccgcgtttccttttaccgcgacaagaacttcgtgcgtggtgctgtgaaaatggtgatacggaaatactccgcccgtccagctgttcgaccaatcgtgccggcggaggacggactctgctttctgcaccgtttcttcattaaataccgctttataaataacaagcggaagattcgggttattcggaatgcggccgtcatcttcaaaataaagcacttgaatatcctctttctgcattgttttcacctccgtatatgtctgtttcccattcatcatttgttaaaacgctattttctcatattccattgcgaagcctgtcggtgaatagtatagtataaaaaaatatggtcaaaatgagggatttaatgaaagccatcgtgatcggaatattggcatctctgttttttgcagtcacatttattttaaacagggcgatggagctttccggcggaagctggatgtggagctcttccctgcgttttctttttatggttccgtttttatttttgatcgtttatgtgaaaggaaaatgggcgccgctctggcatgaaatccgaaaaaaaccgtttttttggctgaagtggagttttaccgggttcgtgcttttttatgccccgattacgtttgcggcggcatatgggccgggctggctgatcgccggcacgtggcagattacaattgtcgcgggtgtgcttctgtcgccgtttttctacgaaacaaaaaattcaccggcgggcccggtttccgccagacaaaagatcccgctcatttcgctggttacttccgtcatcatcctgatcggagccggtctgattcagcttcagcatgcgggttctctgtccggccgcacgatactattcagcgtggtgccggtcgtcatcgccgcatttgcctatccgctcggcaaccgcaaaatgctggaacaatacggcggaaaactcgatacgtttcagcgggtgctcggcatgacgctcgcaagtcttccgttttggcttttgatcgccgctttcggctggcatagagacgggcttccgtcaatgggacagacattccaatcctttatcgtcgcactcagctctggcgttatcgcaacagtattatttttccgcgccaccgatatggtgaggaatgagccgcagaagctcgctgctgttgaagcgacgcagtccggagaggttctttttgcactgatcggcgaaatcgtctttttatccgcggcgtttccgtcacttctttcatttgccggactgttcattattattgcgggaatggtcatgcatacattcgcttcccggcagacagaccagaaaacggctgagcaaacgtcagccaatctcaccggttcctgatttttttacgaaaggtgtcctcctgtatgaaagaagaaattccggcaatatcttttctgtcagctggcaaacgctttgaacaaaacaatacgtcctttgatgtcctaagccgtgtaaccggacatattcaaaaaggttctatcacggcgttgataggcccttccggcgcgggaaaaagcacattgctgtcgctgtgcaatctgatgaatacacctgatgaaggggaagtgcttgtattcggaaaagaaataaggcgctgggacatcagagagctcagaaaaaccgcgggccttgcatttcaatcagctcccgtcctcaagggaacggtgcgggacaaccttctgctcgcagaaaaactccacggagcacagcactatacgcctgaagagctcgcagattttacagaccttccgcgcgggcttctggatcgaaatgcaaaagaattatccggaggtcagcggcagaagctctcgttagcgcgaactctcgccggactgccgtccatcctgctgctggatgaaatcacatcggcgctggacccgtcatctgttctcatcattgagaaactgattacgaaactccatcggcaaaaacagctgacggtcctgtggatcacccataaccttgaacaagccgaacggttatccgatacggtatggtttatggctgagggacggcttttagagaccgcggaaacgaaaacgttctttaaggaaccgaaacatgaaaaggcccgggcgcttttacaagggagcgggtgctgatatgaatgatctttctctgttattgacaagtatatttgtcattattgctttattcctgtctaaatcttttaaagccggcgtcgaaaaggatatgatcgtcgcaaccgtcagggccgtcattcagctgcttatcatcggctatgtgctgtcgctgatttttcgcggtgatcacccgatatttatcatattaatggtgcttctcatgctcacggccgcttcgcacaatgtctccaaacgcgccaaaatgcggatcggctcattttggcgcgtttttctgacactggcgatcgcggaaaccgtgacgcagggacttttactgaccctgcatatcattccgttcacttcaagatatgtcattccgataagcggcatggttatcggaaactccatggtgctctcaagcctgtttttaaacaagctcagttcggaagcggatctgcggaaagaagagatccaactgattctctctctcggaggaacgcctaagcaggccgtccggcagatattgacgtccagtatgaagctcagtatgattccgacgcttgaaagccagaaaacattgggtctcgttcagcttcccggcatgatgacggggcagattttagcgggggctgatccgatacaggcggtgcgctttcagctgctgatcgtttttacaacgatggcctccgctcttcttacatgtatcatactcagcgccttgacatatccttcccttttcacggaacattggcaattaaaaaaattcagcagggaagcgtaggcttttttccctgctgaatgatttatgacaaggtcagagattcatagtaacgggataattcaataatcatcgctcccatccgctcaatgtccggagcaaggaccctctttaccccttcatcccggatcgcttcagccgtcactttgccgactgcggcggcaagcacttgtttttcgaatgcctgctgcacttcttttgtgaaccctttttcttttgcataatcaaagagagaacgcacttgaatggctgtcgtaaaacatacggcatcgacctctccgtttaacagctctgccagcagtttatcgaccgtctccctttcaggcggaatatgctgatacggcagaacagggaatacctccgctccgtttttctcaaggaactccgttaagaccggcgctttttcgccatgaagctgtatcatgacttttttatctttaaagtcaaatcgttccaaggagcggatcagccctcttgttgtaccgtcttcatctgaggcatgcggcgtgatgccgagcttttttaaggccgcatatgttttatagcctctgcagccgattttcgcttcatgaacggccgctaaaaattcttctttcagaccgattttttccgataccgacaataacgtttccgtaccgatgcctgtggtgaatatcacccagtcggctttttgcccggcaaatgttcttacgtcgggttcaatttgatcctccgccaggtatacggttccttggagggaacggacgaccgccgttccgccctgcttttctattaatcttgtgatctcttctattttccgcgaaccgccgatggcaatccgtttcccgttcaatccttttcccatcgctgttttcttcttcccttcagatgccgggcgccctatggcaggccgtcatttatttctattattgttacgcaatcagccgggaaaatcaagctatgctcccgttgaatcccccgtgcagttgctgtatcattaaccgggcagaacgatttgattcgcggagggattttcaatcatggaaacaaaaaaagagttcgagacaaaaggatacgatacttcggtcatttatgagttcaatgaatatcctgatgctcacagcggccgatgtgacaattgcgactacacgctgtttaaaagctcagtgaagggcggaaaatttttgagggaatgccggagatgcggcatgaagaaaaacatataacaaaacaggcagccgtcttccggtgcgctgcctgtttctcaatcaattttcgacggccgccgttttcaaaaattcttcaatggcgcaaacagcctgtttggggccgccggtttcttctattttctgctgcatgcttttcacgcggctgaggatgtttttatcgccgtatacgttttgaacgtctttttgcaaacgggccacagtgacttctttcggcggcagatgcacgccaagccccaattcatccacacgctttgcggtaacctcttgttcgtgcatttgcggaacgacaacgagcgggacacccgcattcatcgcctccattgtactgttcatcccgccgtgagatacgaacagctttgctttctccagcacatcaagctgaggaacgtgctggcggatgataaagtgatcggggacatccgaaaaactttccggatcaattgttgtgccgactgacataataacccgccagtccgagtcccgaaacgcgtcaatacacatctggtaaaattcaggccaggcgttaaacgccgttcccagtgagatgagcataagcggacggtcatcggctgcatcaatttccagacttcccgtatttgtgcgttctccaagagacggacccacaaaacagaatcgttcatcaaaggtttcctgtttcggctgaaaggcccttggcataaagacaatattcagtttttcaggcataaaaaattcttccattgtcatccgtttcaattgttcattttcaatctgctcctgatattcttctatcgcctgtttggccgcttccagtgtttcttcgtctcttcctaattgaaaatactcattcattgcatagctcgggcagaactttaccgccgggatgccgccattatccgcaaacaattttccggcaagagctaaaaaatcaaacaggacgatgtcaggaaggtcgtctttgtacagctcttccagctgcggaagcacttcaaccgcttcttccagaaacatcacaaacgcgtcatttttgtttacccgttcttttatcgtctccgggtccgcctttatgcttgtgcggtataaaacgggaatggcgcccgttttggcaacggaagcttcgaattcctcagtcgtagcgaatgtcactttatacccgcgattgacaagttcctcggctacgggcagcgtgggattgacatgaccgtgagcggccacattaataatggcgatgtgtgtttttctcatcatttttcttctccctcattttcgtttatctccgcttctaaagactccagcccgtacatgacactgtttcggatcggctcaatccggacgggctcaaggtgtgaaaaggcttttacaattcctttcagcgcgacttccgcttcaagtctggcaagcggagcgcctaagcagaagtgtacgccgaatccgaaggaaaggtgcggattcgattggcgatgaatatcaaatacgcccgccttctcaaatttgttttcatcacggttggcagatgcaacgtagcagagaacgatctccccgcttttcaagcggcgtccgcgcagttcagtgtcgtgccggaccgtccttctgacaaacggagcgggagcgcgaaaacgcagcgtttcttccaccgtttgcgcgatgagagaagggtcctgtctcagttcgtcataaaggccgggcgtctctaatatgctgtaaaccgcatttgaaatgagattagtcgttgtttcatttcccgccactaaaagcaggttgcaaaacgggatcagatcttctgccgtgagcttctctccctcttcttcctcttttatcaaaatagaaataatgtcttggccgggctgttttcgtttgctttctattatttccgcaaaaaacgccgccagctccgcctcacattggtcacgttcctgctgatttttctccgccgcttcagggctcgcatctttcggcatgctgacgagaatgtccgaccattttttaaactgatccatacgttcggacggaacgcctaataattctgaaatcaccatgaccggcaaagggtaagagagatctttaacgatatcaatccgccctttgttctttgcctgtttcaggagatgatcggtaatgtctttaattcgcggctcccattccttcaagacgcggggagtgaaagcgcgattgacggcggatctgatttgggtatgcttcggcgggtccatattcagcatggactttgcaatcgagcttttcacatcagtcatgaggcttgagaacgtctctttatcactgatgacttttttgacatcatcgtataaaaacacactccaaaccttcgtttcttcatcaaagtgtatagggctttcccgtctcattttttcgtaccaaggaaaagggttgtatacgtccaggccgttttttcctttcatcagggttctttggatggcttgtctcgtgctcctcagcttactcatatttcatcactcctgattgtttcatatttgaatagttgacgtaccttgaattttatcctagcacatattttcaatttttttctattcataaccttaactattaacataacacaacaaaagtcatgaatccggaggtgaaatttctcccaagaaaacagcagaggcgcacaaaaaacccgagccttcggccaggctcgggagatatgttcactcattcgtctgcggtttctggtgctgcttttggtcttcaggaggctgcgtatttctttccatatcgtccgtatcagcgcccatgcctttcaggaaagaaaacagcagagtgacggccttgttgatttccgggtcttttaaagcgcggacgatatcaaaatacccggtcttcctgccgctgtctttttcctcgacggcctttgtgacccccgcattgattttaacgataaatggctcaagctgttttacatcgagcatgccgagaacgccgcttaacagcaggagatttttcagcatattggccgtttccggagtattcgccttcttcacgaggatatccatcactttgtctccctggccgaagagcccgcgcagaagcgccaaaacgccgcgctcgttcatgtgctgaagaatgtgcagagattccaaaatcgcgtctttatttcgtaaaagagctgtctcgatctcttctaagtccttttttcgtttgtcttcttctgtgacggtctgttttcggatgccgctgattgctttagccattttgctgtttccccctttttacggcgtctcccggaaatacataatctttacgcgcccatttccgatcaacccggacaccgatctgcggctgcgggcttccgtaacggaaattgattttcggaagcggattaacgccttcttttttcaaaatctccatcttcgctgatgtttctttataagccggtgtatcggtatccttatccgcatagctgcttgtcaaaaggttaatggcagcgtcttttgaatcgttcatcgggagatagacttgtttgccttttaccctgtctgtgatgacgcatttgactttcacatttccgtacggtgatgtcagacggacaagcgttccgtcttccagccctctttcttcggcgagttcgggcgagacctcaaggaacacactcggtgttttttcggatattccttttgatcggtaagtcagattcccttcgtgaaaatgctcgagcagccgcccgttattcacatggatatcatattcttcgccaaattctttcggctcggtccactgaacgggatatagaatcgctttgccgtctgaaaacgggaacttatccgtaaataaaagcggtgaatcggttccgtccgctgcaaccggccattgcagtgaattgtagccttcgagacgttcgtaagtgacgcctgcgtagagcggcgaaagcatcgccgcttcttccataatgtctgccggatgttcatagtgccaatcagcgcccagacggttggcgatgtccgtaatgatctgccaatcaggctttgaatcgcccagcggttcaaacacttcgtaaaggcgctgcaccctccgttccgtattcgtaaacgtcccttctttttcaaggctcgggcttgccggaagcacgacatcggcgaactcggccgtacgcgaaagaaagatatcctgcacaacgaagaaatcaagcttttcaaatgcggcatgaacatggttaatattggagtcgacaagccccatttcttctccttttaagtacatggacttcagttttcctgagtggatgccttcgatcatttcatgatttgtcattccgatttctttcggcaagtctgttccccagccctgctcatactttttgcgggctttttcatccgttactttttcataaccggggaagctgtcaggcatactgccgaaatcactggctccctgcacgttattatggccccgaagcggatatgagcctgcgccgggcttgccgtaatttccggtcacaagaagcatgttggaaatggccgtgctcgtatcacttcctccgatatgctgggtgacccccatcgcccacagtgcgcacacgctgccggcttcatgaatcatccgggccactttgattagggtatccttgtccacaccggtatgtttttccgcatattccattgtataaggttcaaggcttttcacgaattcatctaatccgttcactctctccttcagaaatgcagtatccgccaaatcgtgatcaagcagatatttcgatacggcattcagccagacaatatctgatccggcacgcggctggaaaaacacatcagagcgctcggccatttcatgttttcgcaagtcagcgacgacgagcttctgtccgtgcagtttatgagaacgtttaatgcgtgtggacaggacggggtgagactcagacgtatttgaaccgattatcagcacgagctcagctttttctatatctgtaatcgaccctgaatcaccgccgtatccgaccgttctgaacaatccggccgtggcgggagactggcagtagcgtgagcagttgtcgacattatttgtgccgatgacggctcttgcaagcttctgcatcacgtatgattcttcattcgtgcatttggaagatgtgataaaggcaagtgcgtccgggccgaaatgttcttttatatcggtaaatttatcagcgatcagctgcagcgcttcatcccattccgcctcccgaaacgagtctccttcccggataagcggtttggtaaggcgcttttcactattgacgaaatcccagccgaatttccctttcacacacgtcgaaatgccatttgctggggcctcggcctgaggctcgacctttaaaatgtctcttcctttcgtccatatatcaaaactgcagccgacaccgcagtatgtgcatacggttttcgtttttttgattctttcatcccgcatggccgattccatgtccgatatggccaaaatcgatccgtatccggtttcgacgccttttgtgatgtcaatcatcggccgaagcgtctcttggttaatgcctgttaaatagcccgcttcgccttccatgcctttttccatcatggcattacacggacataccgtcgaacaatgtccgcaggaaacacatgatgattcattgatcggcacatcctgatcccaaatgacccgcgggcgttttcgctcccaatcaatgcttaacgtttcagttacctgtacgtcctgacaggcctcgacgcagcgtccacacaaaatgcactggtcgggatcatatcggtaaaacggatttgattcatctttaggatacggtttttgatcgaacggaatgctttgatgattgattttcatttcctttacggtattatgtacttcgcagctcccattgttgtaatcacagaccgtgcagtacaattcatggttgtgcaaaatgttgtccatgccgataatctgcgctttttttacatcggacgaaagcgtatcgatgacatctccgtcctttatttgcgcggaacacgaacgcaccagttccccgttaacattgacgatacaggtatcgcacgtttcaatcggcccgagactcgggtgataacacacgtgcggcacgtcaattgaactattgttcaaaagctgcaaaacggtttggccgttcggcgcttccatttcaaccccattgattgtaaccttctttgtatcagccattttctcttcccctttctgtacccctctatacatcctctatgattcccagccggcctttcactaaaacatctcgtttatctcaggaaacatacgggtatgagcggtaaaaaggaggcgttcacatatgttgaagaaaaaaacactcgccacgggattatcggcagtgatgctcacgggatgcgcattcggcgcagaagcattttcggttacacagcccgtccacgccgcatccgcttcaaaaacggaaaaccaacgtgcacaagaactggtgaacagcctttaccaatcggcgtttaaaggggaaatgccgcaaaatgtgaaaggcctgaaaatcaaccaaagcacaagacaggacgtttacgataaaatcggcgagccggaacaaaaagcagacagccgcaatccatttgatttatacagctggaacatgggaaaccccggttatggattttcctatcataaaaacggaaaaatctcggaaatacgctatttcggaacaggggtcgagcggcgcttaaacctcggcagcgtcacacctgacgtcttaagcaaacaaatcggcagcgctgacaaaatcctgacagtgccaaaaacgggcgaaacagattacgtctaccatacggggcagtatgagctccgcttcgtcatcggcagtgaccaaaaagcagaccatgtcaacctaaaagccagataacgcaaaaaaagcggcctcccgggccgttttttcatagacagcttttccgtcgttccttacaatacatgggagtacaaaaaaaggggaacagtgtgaagtgaatagacatccattgacatacggaatatgtaccgtttttatcatcgccctcggtttgctgtccagaaccgcatacatcaccgccctattgcccggcatcataaacgcttatttaggagatgccttgtgggcggcaatgatttttacaggattcgggcttctgtttcggaacatccggacggaaacagccgcatttttgagcctctcgttttgctgtctgattgaatgcagccagctgtatcacgcgccttggattgacgcaatcagaagcagcacgctcggcgggctgatcctcggctggcaatttgtctggagtgacatttttgcctataccctcggggtatgcgctgccgcatttttagaatgggccgtaaaaagaaaccgccagtctccttcataatcggagcatgccgccgatatgaagggataaggaggtggaagctatggatatccctgcgttatcaatcgcaatgcatcaggcatctctggcgcagaatgtaaatatcgctttaacaaaaacggtcatgcagcaagcacaggctgcggcggaagaaacagtgaaaatgctgccgtcccagcacccgactgccggacattcaattgatgtgaaagtgtaaaaaaagatgccggatgataaccggcgtcttttttttgcccgttgtacgtacaccataccgggcatacaggaataaggtaaacggaaccaaacatttgaaaaggaggttttcctcttgtacgatcctttctatcatgaatacacagccgagagccacgaacgggtgccatatcattatccgcggccgccttattatttccccagaccatatccatactatccgcggccgccttattattatcccagaccatatccatactatccgcggccgtatatcccgttctatccttggtattaatgtttgaaaagaaatgaccgcagacaggaggcttcccctgtctgctattcaactttgaccgacaggatatacgggagggcttgaactttttccattatcgccgctttcccgcttttgcttttcacccttcccttcacttcaagcaccgccttattcaattcataggacgtaatcagaattcctttttcctcaagagaagttaaaatatcatgcatgacggctttctcctcaatcctgaaactgacagacaaagaatgcgccgccggtttaaacagaaaatttaacagttcaagcccgattaacgccaaaatcgtgccgctgatgccgatgacatacatacctgccccgatcgtcagcccgatgcccgacgtagcccaaatccccgcggccgtcgtaagcccccgcacgacatgccgctgcaaaataatcgtgccggctcctaaaaatccgacgccgctgacgacctgcgccgccacccggctcggatcaaaggacgtatggctgttggataacaaatcaaaaaagccgtatttggaaacgatcatcatcaaagcgctgccgacggccactaaaaaatgcgtcctcaaaccggcttccttcgccctgaattctctctccaatccaataagagccccaagcagacccgcaaccgccagacgaatcacaaaatcaagttccatccgtctctctcctttccttatcttcttacccgcttttacaccccaatcatgcggtgtatctttttttaaaatgcaccgactaattgacataaggaggttttatgaaatttattctgtggttttttatattattgttatttagcttatttattttgggaggatataaagcatctgtttctcaccctgatttcccggtgccattattcgctatgcacactaaaacaaaggaatatgaaaaaggaaaatacgtttcaaactatacataccgtttcgcaaaagaagaagaaggtccgagcggtttataccaattggaaatagccgaaaaaggctggaaacttatagggcaggaaggacttatcaaaacctatgaaaagcgaggagaacgtgtttcactttttttcggtacgggggaaataagcgtcattgaagaatgatccttctcaaaagacaggctgaaatccgcaaacggcatatcttttacgacttcctttatctctgcgaatctataaattcagccaatatctcaattaaggcgaacacctttctgatccaaaaaatgccgccttcaatgagaaaatcattatacaaaaacaaaagcgcaactgaaaaagaataagcacctcataaaaaaagccctctttttaaaaaagagggctgcagaaggaaaacaggtaattatttatctaaagtgtactcactcacattaaaagtaagaatgttcccaaaaacaatatgatcccttctattttgaaaaggccctatattattatagtgcttctcgataacatatctagataagcctattccagaacttttttgatcataccatctgataaaatctttaatctcttccattgaaagatcaaattctttctcaagacctgtggtcattgtaacaagaagaattgcccgattactggcgggctgtttatttggtggttcctcccaactgcatctctcaaacagaatgtccggcaatcacctcaaaaaacgaggtgaaatctgtcagtatcccgtcacccgccagctgtttttcttcaaataacgcgcggttttttccgagcggatcaatggccataatcttgcctgcacctgcttttttcgccgctgtgagccccgaaaaggcatcttcaatgactaagcaatcttcaggtctgaggcctaacttttccgatgcgatgagaaaaatatccggcgccggttttccggggaagctcccgtcatcaaacgtgactttgtcaaaatcaaaccaccgatccaactgaaagacgtcaaagtaaaactcgacattttcctttaccgtagccgtggcaatggtcattggcgtttctgaatttttcagatgattcaatacgccggtcagtcccttcgtcagctttaactcatctttgttttcaaggcataattctctgtagtaggcttctttttcaaaagacagcttcttgatttcttcatttgttaaatcgccggaaataaaatacgtcaggatttcactgtttgttctcccgtgaatgttaacgaaaatgtcttcatcagaaatggttttcggcgcgtattttttcaccatgaaaaaccatgctttttcgtgcagatgcgaatcttgaaacatcgtgccgttgaaatcaaaaataacccctttcatcgaaccgcccgccttttttatttttttgcgattttgacatctacatattgctcgtaatgaatttgaacatctttcatcactttatcatccgtaatcagatagtccatatcgtgcaagttatagaatacgtaaaaatcttcccggttgaattttttattatccgccagcaaaaatttcgtccgcgaattattcagcgcgatttgatgagcttccccttcttcaatgctgtaagaagaaatctcatcattatgtatgccgttggcgctgatgaaggctttcgtaaaattgaatttctgcagattgccgttcacgatgggcccgacgaaggcaccggtgttttttcggaaatcgccgccaatcaggatggtatcggcagtgtcaccatgttttaaaatatcaaatacgggatagttgtttgtgataatcctgattcgcttatgcagcaggtgtttggctaaaagttcaatcgtcgtgccgggccctaaaaaaacggtatcgccgtcatttacatatgaagctgcgagttccgcgatcttccccttctcctccatttgaacacccagtttttcattatgcgataattcgtgatcaatggaataagatatgctctgtgcgcctccgtgaatacgtacgatttttccggccttatccagttcgtccagatctcttctcactgtcatatcagaaacttccaattcatcgataatatcactcaccgtaataaacccccgcgagtttacgctatcgatgatttttaaaagtcgctctttttttaacatgtttcaatcatctcctcaactttacacacaatctaacacaccgcggcactccggtcaacaaaaacaaacactaacaaacaccataatcaacatataaaacaacgaaaaacttatataatccctatgaaaacagatgttatttctttatgaagctattgacaacaaaaatgtatgcgtttactattaaacaaaagataacaattacaaacattaacaaacttaaattcacacattggcgaaggaggattcagtaatgctcaaattacctcatgactttattttcggcggggcgactgcggcatatcaagcggaaggcgccacaaaagaaggcggcaaagggcctgtggcctgggatgaatttcttgaaaaacagggaagattcagccctgatccggcaagtgatttttaccgccagtttcccgaagatattaaactatgtgaaaaattcggaataaacggcatccgcctttctatagcctggacgagaattttccctgacggcacgggcaaaatcaatcaggaaggtgttgattactatcatcgtattttctcagaatgccataaacgcaacgtcaccccttttgtcacgctgcatcatttcgatacaccgaaaagattatttgatcagggagatttcctcaaccgcgctgcaatagaagcgttcgtcagctatgcggagttttgctttaaagaattcagcgaaatcagatattggagcacgtttaacgaaatttatcccacagccaccaaccagtatttactcggggttttcccgccatctgttaaaagtgatatcacaaaagtcattcaatgcctccatcacatgatggtagcgcatgcgatgaccgtcaatctttttaaagacggcggctatccgggagaaatcggtgtcgtccactcattggaaacaaaatatcccgccagcgactcagaagaagaccgtcacgcctgttttctggatgacgcgttatcagtgagactcctcctcgacgccacctacctcggctattattctgaggaaaccatgcgggctctggatgaaatctgtgaggcaaacggcgcttcatacgagttttcagacagtgactttgacgtgatgaaaaaagcttcaacgcgcaatgattatctcggcatcaatcattatcaatgccatttcgtcaaagcgtacgatggagaaaccgttattcaccataacggaacgggcgataagggcacttcggtctataaagtaaaaggaatcggcgaacgaatttacaaagaaggcctgaagcggactgattgggactggctcatttatcctgaaggcatgtatgacatgctgatgcgcatcaaacgggactatccgcaatataacaaaatgtatattaccgaaaacggcatgggctataaagatgagtttgaagacggcatcattatggataaggcaagaatcgactatttaaaagtctatttagaagccgtcagtaaagcgattaccgacggagtcaatgtaaaggggtacttcttatggtccttaatggatttattttcatggaccaacggctacaacaaacgttacggtcttttttacgtcgactttgacacccaaaaacggtacccgaaagaatcggcctactggtacaaacttgtaagtgaaacaaaaacaatcatttaacgatcatacatggtgaaaagattctcttttcatcatgtgtgccgtctttaggaggtttttttcatgacaaaggaagaattgcagatgctcggttttgaaatcgtcgcctatgccggcgacgccagaagcactttattgaaagtcctgaaagaagtccgtgccggaaacttcgaaaacacggaagcagcattgaaaagcgccgatgaaaatttaaccctcgcccacaatgcgcaaacgaaaatgttagctgaagaagctgacggcaaggacatggaattaggatttattttcgttcacggtcaggaccacttgatgacaacccttttgctccgtgatcttattcaggattttatagaactctaccgaagccgccgataaggagtggaaaaatgaacggtatcatcaagcaaatcgaaaagggaaaaccgttttttgaaaaaatctcaagaaacatttatttaggcgcgatccgcgacggcttcttaacggccatgcctgttattttattcgccagcattttcatcctcaccgccgctgtgccggaagtgttgggtttcacttggcctaaaagtgtttctgaatggctttggaaagtttataactattcaatgggcgccctcggtctgatcgttgcggcaacaagtgcgaaatgcctgagtgaatcaatgaaccgaaaaatgcctaaaaacaaagggatcaaccccgtttcagcgatgcttgcttcagtcgtcgggtttctcattttaagcgtcactcaaatcgatggcggattctccacggaatacctcggcacaaaaggtcttttagccgcttttgtatccgctttcataacagtgaacgtttacagattctgcgtgctgaaaaatattacgattaaaatgcctaaagaagtaccgggtaccatttcacaaacatttaaagatgtttttccgttcgctttttccgttttggccatggtgatcgttgatttattgatcaggaacacgctgaacgtatcgtttgcagaggctctctcctctctcttatcgccgttttttaccgccgcagacggttatttcgggatttgtgtcatttggggaatgatggcgctgttctggtttgtcggcgttcacgggccttctattgtggagccggccatcgcagctattatttacgcaaatgtggaggcgaaccttcagctccataatgccggcgagcaggcgtccaacgtgctgaccgtcggactcgggaacttcgtcggcacaatgggaggaaccggcgcaacccttgtggttccgtttatctttcttcttttcgcgaaatccaagcaattgaaagcagtcggaaaagcatccgcggttccggtgtctttcgcagtaaacgaacctctgctctttgctgcgccgatcattttaaatccttattttttcattccgtttgttgtaacgccgatggtgaatgtctgtctgtttaaatttttcgtggatgtcatcggaatgaacagttttatgtatgttcttccgtgggccaccccggcgcccgccggcttgattctcggaaccggcatggggctctcggcttttgtgctgacggctgtattaatcattgtcgatttcctgatatacctgccattctgcaaagcttatgacaaagtattagcggcgaaagaagcccaacacaccgagcctgaaaccgcgccgcaaacattacagcccgccatggccggcgcctcagaagacgcggcctccgtcatcagcacaaatcttcaggaatcctcatccgccttggaacacggcaccaatgtgttagtgctgtgcgccggagcgggaacgagcgccatgcttgcgaacgcactgacagaaggagccgaagaatacaacgtgccgattaccgcctcagcaggcgcctacggatcccattacgacatcatgaaagacttcgatatgatcattttagctccgcaagtcggctcttattatgatgacattaaagaagatgcggaccgcctgcaagtgaaactcatcgcaacgaaaggagcagaatatatcagcctcaccagaaattcacaaaaagccattcagttcatactggagcatacctcaaaatagaatcggaggtttatcatggatgccaaacttttaaaatcaagattcgaagacattttcaagagaagtaacggagacctgtttttcgcacccggccggatcaacctgatcggggaacatacggattatataggcggccacgttcttccatgcgcgatcacgatcggaacatatgccgtatgcgcaaaacgcggagatcaccagatccggttatactcagaaaactttcctgacagcggcattgtctgccttgatctttccgccacagcatacaaaaaagaagacggctgggccaattatccgaagggggtgatccattaccttcttaaagccggcggccaaatagacagcggaatggatattctttttcacggtacgattccaaacggagccggtttaagctcctccgcttccattgaaatgttaacaggttccattttaagaaagttattcagcctggatgtttccgatactgaactggcgcttatcggaaaaagagtcgaaaatgaatttatcggcgtgaattcaggcattatggatcaattcgcagtgcaaaaaggcaaaaagaacatggccattctgttaaactgcgataagcttgagcacgaaatgattccggctgcttttaacggatataaaatcgtcattatgaatacgaacaagcgccgggagctggccgcttcaaaatataatgaactccgcagcgaatgcgacgcagctctctcggaactgcggcaatatcggaatatcgcatcacttgcggaattgacggcagaagaattcaacgaactcgaatcccttctctcctgtgaaactttgcgtaaaagagcccggcacgcggtcaatgaaaacgagcggaccctctcagccgcggaagctctcaaatcaaatgatttgaaaacgttcggcgagctgatgaatgcgtcccaccgttcgttacgcgatgattatgaagtgaccggtgacgaattagacgcgctcgctgaagcagcctggaaagaaggagcactcggagcgcggatgacgggcgcggggttcggcggctgcgccatagccattgtggaaaatgaagaaaccgccggctttatccgggccgtttcatctcactaccgcagcaggacaggtcttgaagcttctttctacatcgcggatataagcgatggcgcggctgaatggagggaaaaataaatcatggcgattctcgttctcggcggagccggctatatcggttctcatgcggttgatcaattattaaacaaaggatttaaaacgatagctgtggatcatctgcagacaggtcaccggaaagctgttcatgaaaaagcagttttttaccatggagatatccgtgacaaaccgtttcttcgctctgtgtttgcgaaggagaacgtaacaggcgttctccattttgccgctcaatcccttgtcggcgaatcaatgaaagaccctctttcatatttcaataataatgtgtacggtacgcaaattacgctggaggtcatgcaggaattcggggtgaaacacattgtgttttcttcatctgccgctgtatatggcgaacctgaaaaagtgcccatcacagaagacatgccggaaaagccggaaagcgcatacggcgaatcaaaactcatggcagaaaaaatgctgaagtggtgtgaaaccgcctgcggcataaaatatgtctcgcttcggtattttaacgttgccggcgcgaaaacggacggttccatcggagaagatcatcatccggaaacccaccttatccctatccttttacaaaccgcgctcggtcagcgcgaggaggttttgatattcggcactgactatgatacaaaagacggcacgtgcatccgcgattatgtccatgtttccgatttaatcgatgcccatattctcgctctggaatatttgcaaaacggcggagacagcggcattttcaatttaggatcaagcagcgggttttccgtatcagaaatggcggaagcggcccggcaagtgaccgaaagagacataaaagtaaaagcggccgcaagaagacccggtgatccaagcaccctcattgcttccagcgataaagcgcggaacattctgggctggaatccgaaacaaacggacatatcggaaatcattgcgtcagcatggaattggcatcggcaacatccaaacggatacaaggacaaatgaaatggaggcggcggtcattgaagtttttgaatcagtggcagggtttctgaaagaaagcactgtcttaggcgacataaatgaaacagatgtgatttatacaagaaacagacttctcgatctgctcggactgacggattatgcagaaccgaaacatatcaagaaacaaaacaggcttcactatttggacgaaatggtgaaagacgcggtaaaacggtcaatcattaacgatacgccggctgaaagagacatgctgggaagcaggatcatggacgtgatcacaccggccccttctctcatcaatgccgcgttcagcgaattgttatcagattgcccgaaaaaagcaacagattacttttaccgactgagccaaaacaacgactatattaagacgcgggccattcgaaaaaacatcgtgtaccgctcaataacaccttttggggaattggacatcaccattaatttatcaaaaccggaaaaagaccctaaagacatcgccgcggtaaaaaacagtccggaaaaccggtatccgacatgtctgctctgtatggaaaacgaggggtatgccggaacaccgcatcaccccgcccgttcaaatcaccgcatcatcaggcttgacttagcgggagaacagtgggggtttcaatattctccttatgcgtattacagcgagcatgccatctttctatcaagcgtgcacaagccgatgaacatcagccgtgacagcttcagaaggcttctggccattacggaaatcttcccgcattatttcgcgggatcaaacgcagacttgccgatcgtaggaggctccattctttctcacgatcattatcaaggcggcgcccatgagtttccgatggcaaaagcgggttccctctacccttttcatatgcgtcattttccagacgttcaggccgaagccgtgaagtggccggtatcagtgatccgccttcgcgcaaaagatccggatttgctgacagatgccgctgcctatgtttttgaaaagtggcgggaatattcagacgaaaccgtcagcatcatcgcaaagacaaatgaaccccataataccgtcaccccgattgccagacgcaggggaacggattttgaaatcgatctcgctctcagaaacaaccgcacctccgaagattatccggatggcatttttcacccgcatcaagatgtccatcacatcaaaaaagaaaatatcggtctgattgaagtgatgggactcgccgttttacctccccgcctgaaagatgagctggcagaagtgaaaaagtatttactgaatgaacctcatgacatcaaagatattcatcttccgtgggctgaaaacatcaaagcggataaagacgtgacaccggagaatgcagccgctgttttacaaaaagaaaccgcgaatgtatttttacgcgcgctgaccgatgcaggcgtttttaaaatgacacccgaaggaattcaggcgtttcagcgtttcacgacgttattggagaatggcagctgaaacattcagagtgaaatcaatcaacaatcttttttatcaggaggtattgtgatgttcaaaaaccgattgaaacgtgtatttataaacgcaatctgtctttctctcattttcactgcttttacattctttgagaagtttcctaaagcaaaagcggatgccccgtttgcctatggcgctgatataggatggctgaaacaaatggaggacgaaggtgtgcgctggctggatgacggcggaaaacagaaagatgccttgcagattcttaaagatcacggaataaatgccgtgagactgagagtgtttgtgaatccgccaagcagctattattggctgaaagacgggacaacatggaccatgctcggctatagtgacaaagcgggcgtacttgcggcggcaaaaagggcaaaagcgttaggaatgaaggtaatggttgacttccattacagtgatgtgttcgctgatccaggccaccagatcaagccgaaccaatggaacggctattcaaacagccagctgcaggcagccgtgtataaccatacgtacgatgtcatgaaagaacttaaaaatcacggcatctcccctgattgggtgcaagtaggaaatgaaatgaattcaggaattttactgcccgacggcagcacgaacgatttcagcaaattgaccggcttactgaacaaaggctatgacgccgtgaaatccgtcagcccggccaccaaggtcatcagccatttggcacacggcacggacaacagcctattcagatggtggtttgatcaattctttaaaaacggaggaaaaaccgacatcatcggcgtttcattctatccctattgggaaggcaagccgtactgggagctcaccagccatttatcaactaatttgaatgacatcgcctcacgctacaacaaggaagtcatggtggttgaactgggcggagatgaaaataacccgaaagattcctactggaccataaaagacaccataaaactggtgaaagcggttccgaacggcaaaggaaccggcgtattttactgggaacccgaagctcactccagcgttctgtcagacgcgtatccattaggcgcaaccgccaaagtgtctaaaaacgtcttgaaatacacaaccgcaatcgacgcttttcatgatgccgcaacaggaaaatgattgatgcgaatctcaagcaggctcattgtgcagcctgcttttttataaggctgtagtgttggcctgttatgaaacagagcaagtaacgaatacggaaagaaaaatactcaaaaacccacgtttcggttaaaaaccgctttttaaatagaatacttcttctcttccccctccttcttatttctgcgcactatctctcagttcctaaatcataactttacgattgttgaaaaagaaacaaacattttataatattgtgtaagcaccaccgagcaggaggacgggacatggacaaaaaagaacagctcctcacggatttcagggacttttttaacaagatggtgtggctgaataggctgaagatggaagaaagccttaaggggcataaaccttctgaagtgcattgcatcgaattcatcgaaaaaattgaagacgccaatgtgacaaaacttgcggagtccctttatatgacaagaggcgccataagtaaattaacgaagaagcttatcaataaaggccttatcgaaagctatcagaagccgcttaacaagaaagaaatctatttcaggcttaccgaacaaggaaaagtcatttataaaattcacgaggaattgcacaaagagtttcaagaacgggacaaaatcgtgtttgaacaagtaactgatgaacaatttgacacgatgctgaacttcgtggaaacatacagcaggcatttggattcagaaataaagaaacttggtgcagacttgaaatcggaataaatatgaataaaaccataggcagccctgccccatgaaaacgggctgcctttttatatccctcttattgttgacaaagaaacaaaatcactctattattttgttgacaaggaaacaaagacagcaattttgagaggagaatactatgtcaacacataaaagaaaggaacttcggcttccaaaagaagttctcacagccgcctgggctattgcactgggagcaatcgctccaatgcttgactctacgatggtaaacatcgccatcggcaaactgaccaaagacttcaacacaacattggatatcattcagtggtccgttacaggctatatgttagcacttgcgattgcagtacccgtatccggctggcttatgaataaatataacggtaagaaaatcttcatcggctcagtcatcgcctttggtgtcatttctgtttttgcgggaatgagccgtgacgtttccagcttcatcttcttccgtttgcttcaaggattcagcgccggcattattactccgcttatgtcaacactcttggttaaaacggcaggtccggaaaacctgggaaaagtgatggcaatcgtcagcacccctatgatcttcggcccgatcttaggacctgtcattgggggtttcatcgtccaaggcgcttcatggcattggattttttacatcaacgtgttcatcgttttgattgctgcaccgcttatgatgaaaaccattccagactttgaaccattcaacaaagatcgtaaactcgatattttcgggattatcaatttgtcattaatgagcgcggcattgatgtacggtattacaaaagcggcggatcatgcatcatttaacaatagcgacaccattttatggacgggcatcggtcttgtttcagcagctatttatcttgtatataatcagatcaagaaaaaccaaaccgtgctgcctatgaatttgtttgcaaacaagagcttcttggcatcttcgatcgggttgttcttagcgaatgttgccatcatggggccgatgttaatacttccgctgttttttcaaaacattcgtcagttcacggcagtcggagcagcactcgctttaatccctcaaggagtcggaatgctcgtgactcgtccgctgatcggaaaaatgattgataagatcggtgcgaaatacgtggttacggtcagtcttgttctttcgctgatcggatcgatcccgcttatttttatcaccgataacacaagtatgatttggatttccgtcgtattatttatccgcggcaccagttttggaggaattatgctaccattgatgagtgacgcttatacaggtcttgacagcaaacagcttccggaagcaggtgtcggtattcatatgattgaaaacctcggttccagctttgggtcagctgtgatcgcaaccgttaccgcaactgtcatacaaggattgcagccgacgattccgaacagtttaaaaggctaccatgccggattcttagtatccgtcatcatccttgcggccatcttcattccaagtctgttccttacccataaaaagactgccatataaagaactttttaaagtaaaaaacccttgcgcagcaagggttttaatgaatgaaactgatgatggttgccggcagagtcagccaacaacagacaaagccttttactcattcacattgcttttcattaaccattctacttccgttaattcttgtttttgaacgtcttttgtatgttttttcgtaaaatggactttaacagcttcttcgttttcccaaatctcccaaagcatgagtttgcgttctgatggttcgagcggataagcatggaactgaatacagccttcttctttgttcgtttcttcctcaagttttttgaactctttcattatttcattaaggtctttatcactgatgatttttaagcatgccgttatgtaatgcatcgaaattccccctcttcccatctttttatggctttacattataacatttatcgaaaaacgaaaccgcctaccgcattctcaacatataaaaaaccgtccataaaaatgaacggcaatgtttatttaagagcattaagagcgacttttgcagcctcagcgataagagcattattataattggcatcttccgtaaaccggtttgacaggattgccaaaacaattggggctctgtcaggcggccaaacgatcgcaatgtcgtttcgtgtgccgtagcttccggctccggatttatcgccgacttcccatcctgcaggagcgcctgcccgaatcagttcgtcgccggtagcgttgccccgcatccaatctgttaaaatcgtgcgcttgtcagccgtgagagtgttacccaaagcgaaagtcttaaggtcagttgccagtgcttttgcggtgcttgtgtcacgacgatccccgggaatcgcagagtttagatccgtctcgaatcgatcagctttcgttacatgatccccgatctgtttcaatgacttttcaaaacctttgggaccgccaagctgctgcagcaataggttcccggcagtattatcgctgtaacggacagcggcttctgagatttctttcaggctcatgcctgtatccaggtgtttttctgtgattggggaatatgtaaccaaatcgtctttgctgtagcggatgatggcattaagtttttcatttgagcttttcttcagaacagcagctgcagccagaactttataggttgatgcgtaagcaaaccgttcattcggccgataggcgattgtcttgtttgaacctgtatcaatcgcataaacgccgagcctggcatcaaattttttctcaagctgaacaaatttctgattcgttatacagcttgtcatttttgcgtcctctatagatttcgcttcagcatgcgctgagccgaataaaggattgaaaccggtaaagcttaaacataaaagtccaatgcatattccaaattgtattctcgctttatttttcacatccagacctcctcattataatgattttgtatacatcttctaattaacattacaaacagggtgaaagtcaatataattcctgtgtgatgttttccgtgacagttaggaaatcagctgaaaatttaattaaaacacccctgactcttcaatggatagcgtttcttccggcagatatttcgcgaagaacccatgtgatacagcgtttgatttcttgcttgagccacggccgctctacccggattcattttgccatctggaccatgcggcggaagcaggcggcgcaacggccgccgctcctgtaagtaaaacaactgataaatgattgaatgaatcgttttttcaccgtcattgcttctcctgctttttgtattctgcgatttccttaggggtagcctttcgcactccgtctgcgtctgtcctgtttgccacttgaacgccttccatgttttttatctcgctgacgactcccaaatgctctaaatacacatgatcaccaatcttgaaacgattctgtttggcccgctcctcggtcatgctcctgtattcagtcgcggctttcatttttaattcagccagacacatttgacaaagggttactgttacagaattgccgttaaaatcagtaaacgaaaccgatctgacagattccttttccgggtgcatcgtgcatgttttcttcataggcgatggccgtgtaaattcaatcattccgcttcctcctccataaaagtcttttcgtcccctgacataactccggatgaatgggaagttccatacactcgcattcgaactgtcacgacaccgccatctgacggattttcatacatccttcatagctgcaagcctatattcctttatattcccaatgcttgccgcacttccctgttaggatgaagtttctaaagctgttgaccagttgccgcatgttggttccatgcgaaaagccatgtggaccgccgtatcccaattcatacgggtaattttcagccctttcatatgtgtgtatgctttttaaaggaggcgcatcacatgatgttctaacaaccaattcaacttaaacaaagtgatttagtcgacaaaaagattgtcaggagcaaaaagaacggtgaatctaaaagcaattgatctttttgaatatggattgtaagtcaacgcattttccaaattaataagataaataaaaatagaccccctcacagttaatggtaagggggttattgagtatacggccgatatttcttttttgaatccaaatgtctgcattcccataccgtctacagatatactttctctagattggaatattttaagcatgtataaggataacaactgaaataaacgaagattatgcaaaaatggagtgatgaggtgttgagcagtaaagtgttttatgattttgccgccatgttaatgtacaaatatttaattaatactgtattagtttattcaatatgttaattttactttgatctttattactcttctttgttcttctatatccatctaataaagacttattataaaccttgaggtaatcatcaatagtcagcaaatgatatttggctccgtcatcttccaaaacccctaggttattatagtctacgtctgcaaatggttttaaatcctcaatgcaagcaatgcctattttagtattcgttttcctaaattcatgctcatgtaaatcaaccaatttatatccttgcagttccatacttttttttagcttttcccacttttcctctaaaaatattacaggaataaggatatcaatgtcttctggtgaaaagttcaacccagttaccttctcaagacctaaagatccatataataatggaataatgtctaactctttattaagagttttagctatatttataaattcattatacaatttcatctttatatccccaatttttggccatttagaatcaactgctacttggagtttctttggaattttataaatcctgtaggtcaattttataattttcactttaaaaggattctattatctcaatggatctcctgaagctatatgccaatgcagatgctttgaatcctgataatctcctaagtttgtaagcaccctgcaagaaccactttcttttgtcaccttcgccgcaacctttttaatcacacccagcaactcgagtaaaagttcattgtcgtcttcttccaaagtgattaaagaagagatatgttttttaggaatagcaacaatatgcaccggccaaaaaggtcttgtatgatgatacgccaaaacattctcggtttctaaaactttatttacttttgtttttccgcttaatacttcatcgcaataaaagtcttctgtcatcattaatcccccttactctttagctttgatcatcataatcaatatacaaattaacccaatgctctgctttatttttcacttttgttattaagataagagaaccacaataaacttatgaacccagcagctcctataattgtagatataatgtaagtccaattaagtaaatccataaacttctcctctgagaaataatttcaatacatcacattttgtgtttttttctgattaataaattctttattcttcctcaaatttatttattctgcttaacattctcctatcgtttttcgaagctttcttcagcgatcttttctcatataatgttcctttattaatcacaacaaaatcagtattattttgcacataaacttggaagtcagatgattcatagtaacccgtaacgttttctaaaaccgtcttggaattgtctttattatatagatcatagttgactggcggtctgctgattgcaaatttcccaaaaacagcaacatcatccttaccgggagtatggctcgctcctttaataaatatgacgctaaatattaaaatcaagaaaattgcaattaaagttcctgcaaacataaatttttcatttcttttccagttcaacataaacaacccttttctttatcatgccgtgttgatataagtaaatcttacaatttatgtactaacatataaatgtttagaatttaaacaagccgcttccattcaacatacttaaatcgctgctgatgaaggtcttccaggattgatgcccatttacctcagccttccgcaacaatgcttttttctctccatcctaaatccgttcacttcaaagttactcacccttccgaaagtgtttttacttagagctcagctacttaaccacaactttttgtacaagaatagagtcccaaagccaaaagatcagagcaaataatacgctgaataaatatatctcataactcgctagtatagaccctattggattataaggttcaaagagaacggccatgattagccatgtaacaaatgaagatactgtgtatattaagagatatgttaaattgaaccttctaggttttcggtttaagataagctgcaatggcaatgcaaaaattaaataacatgtcaacatgatcccgctaattataagataaggaacatattcagcttgatgcagggtgatcacatataccagtgtagaacatatggccgacaaaataaggacagctaggtatcttactaccatcaaatctatctccccttacgattaaaaaacaaaaatgcttgcaattgctatttttcgtaataataagatttgacccaaggatagcttctgcccttattttcacaccattcaacaaatccctttgattgttcttctttaaacaacaaccagtcattcaacaaatcttgataatagttaagctgttccttattgctttttcttgtttgttgacattctatcttgttgttcaactgccgggacttggtaagaagtgcttgatcttctttaatatcgcctagatataaatcttcggatatgtgatgaaatgaataccacaaggcgttcaaatgaatatcgattaacgttaataaagataattgttcattactgccgcccagtctaagtgcattatttaagtaatcgatacggttttcagtatttaaaaacacaccataccacctgtatggtcttggatcttcggggttactcttcatccatgcttcaagcagtggctttaaaagatccatttccaaagggtgaacaagtatatggtgaatatcatctgatgtttctaataaagcaaatagccaacaagcaaaattctgttgtgcatgattatcccacgttttggcttcatcgataaaggaagataatgctttaagggattctttacgtaaccctttttctttgagagagcaaaactttttaaataatgggtattcatccagtctgtcattttttaagatattagttaagacatctatcatgattcacatctctctttgcctagaataaacttaaacaatttgaaatacgacatacaatgcaacttcagctacaagcaaataaatcatatatctagcataatttaatacatcttgatcagtatttttctcttttttaaaagtccatgcaaataaacctaatacagttgttaccaatgcgatttcaattattgttattattgacataccttcctcctaaaaaagaacagggtaaatagacttatgttaattttcattcaattaagtctcttcagtcaggatgtatcttatgaaaaatttccatttcttcatgtttatcgccttcaatgagctcaaagccgcccggtacattatacattattttccgttaatatatcaattccggttaataactcacctgcatcttgaattacgccattttcatcttttacacactacaattcattatctaaaaatatgctccaaccttttaatcggcttaatcttttcaattcactttattcaaacgctgccgagtaattcctgcactccggtttctcatccataagctctcttctcaaatgcttaatcacataattaaaaggacaaagaagtgggtcaaatgattcattttaccattttagatagtacattgatcttattcctcattcctccatgataaaatcttgttaaagtatttcgaatgaaaggattatggtcatgaaagttttcgaagcaaacagcctgctggccgctgccaaacagcgtgcgagtgaatacaaagaactgcgcggccagatggttaatctaaaaaaagcgtttcaaggtatggctgacctcggtgacagcgacttttcaggccggggcgctgacaacatcaaagcctttttccaagaccacgccggcgtcacagacagctggcttgatctgatcgatatgaaaatcgcatttctcacaagccttcccggcaaggtcgaagatgccggactttccaattcgcatgtggaggaatcatttctagagcatgagctcacccacgccctcagtaaatcaaaggcaattatggaagggcaaaaaaaggatatgggggtccatcctcagagagatcgaagacatcatctcgctcgaattgttttcaaccgaaagcacagaacaaaagctttcttcagctgacaaaaaaagaagcgaaacgatacataagctcggcaagcttgatcacgatctaacgaaagaatacgcagaaaccgaagcaaatgaacattttatccaagcagatttccagcagcttcaaaacgcaacaggcaaaggaaaaagcgccacgccgcttcattacaacgccaaggcgtaccgtgaaagcgacatccataagaagaaaggcgatatcgcaagacattcggatgcttatttgacgattaagaaggaagaagcgaaagagcgtgaaatcaaggatctgaagaaaaagctggctgatggcgtaaccgacccggatgagtatttggaaatcgcgaaaaagatcggctatgaaaaccttgaacctgctcaggtggaatatgtgatgcagcttgaacaagcaaaacagctcgaagaagtcggagatacggcttgggatatcgtcaaaggaataggcgtcggcctttatgatgtcgggaaagacaccataaccggcgtcaaagatctggctgtcggtgcatgggatttttaccatctctctgaagaacaaaaagtcgctaaaaccatatcggctgtattgaacacaccctcctacgcaaaaatcatatggacaaacctggcggattcatggaatgataaaatggttaacggggatgcgtattcaagatcacattacatcacttacgccatcgggagcatcgtcgggctcaaaggttccggctcagctgtaaaagtatcaagcaagctcgcaaaaacaggcgccgccaaagtggataacgtcttggaagccggagaaaaagcggctgcaaaacatgtaaaaaccgggattgaaaaaggaaaagattatatcaattccatttcgaaaaataagtacgaacccgcacttgccggaatagcacaggatattgaaaatactcacaatgtgaaaaatacgcctttgttgaaaagtattattgaagatcagaaagagagtgttcttagaaaatctgtgtcttctgacaatagcggtatacatagtgttaaacaaggagacagcagtcctctcgcaccaggcggtggcttagctgctcacgaagcaaaaggcggacatcttatagaaagacatgttggtaagactgatgaagagttattagagaggctacagataaacaagaagatacgtgcctcttctagtttcactgataggccaactgcagaaagagtcgctaatgaaacattaattaaacataaaaaggaaattgaagagtggttaaaaagtgatgttaatgatccattaccgttaccttatagaggaactgaagttataggtagaggagttcgtaaaggttcaaatgaagttaaagatatgactaatgctagaatagtattaaaaaaaaatgaagatggtagctttatattaacaggctacccaacgaggtgatatataatgattgaaattaaagtttctgatcctgtatttagatttctcggcggacatttccaccaagatatagaatctcccgaagatgctcttaatgaatatctaaatgaagcatcacaaaaactaaaagaaagagatttaatagcactaactgagtttgtaaatagtgattattcagaagaagacaagaatgaatttatagaggaagcagcggatggcatatactttcctgaagatgatataactccattagaatggcttaagcaagtcactgaacaaattaaaaaacatcttaaaacaacatagttagagaaaaagagccctcttataagaagggcttcttttattaattcaatttcgctttcgtttttggtccgtaaatgccgtctggcttcaaaccatacatgagctgaatcgtactgaaacgttcagccgcatttactgatgtaagtgtatttgaataaattgcagaaaaaccctcctcgtcttgagaagggctctgacttatacttctttttctctaaatcagtccgaagcaaaaaactgatgccgctcaacttttcaatctgcccctatgcttttcttttgctttttgttttctgattaaatatttttgttcctttattttttctctttattttctattcagttgttttttcttttcttgtttcaagctcctgttttatcgctttttatgccttagttgatatcccgatatttttcatctctttagaagcttgtcgttgcaatctttttgggtttaatttcttagattttgctttaacacaaacctcttcttgtcagtgtgggagagagtctgtaaaaaaggaaagggtctccgcttattttaacaacacttcaagttttactttggttcaagcgcataaattccatcagcttttaatccattcatcaattgaaatcgaattactgcattcgctgtcttcgctccatatgcaccatcaatcccgaagttccttcgctataatgaagggcgacagcgccgttcgaatctgttttaagctctcccctcggattttaatgggttttcaactttaaaaaaccggaagacaagaggaaggatgctttcttgccttcagatgaagagccccctgaatcacttctttatcatcgacggcaaaatgatagcttgtcgattcgctgttacccgacatataactgatttcattggcggccgcatgcgtcatttcctgtattgtgaatgattttcggagtgccgctgtatttgccataaaaaactaaatattccgtttttcaaatacaaaaaaacagctggattaaccagctgctgatcgttatcactttagccgttcagtgatacgaaatttctgtatttctctgaaatgaacaggtttcggcaaagaccgccgccttaaaggcgatgtttatctcccttgcagtatacagtgaatgtacttcaaaatcagcccaaaaagcagctccgtcctcaattcgcccctcgatgaatgatgacaaaatcaataaataagcattgtcggactcaaaggttccggctcagctgtaaaagtatcaagtaagctcgcgaaaacaggtgcagctaaagtggataacgtcttggaagccggagaaaaagcggctgcaaaacatgtaaaaaccggggttgaaaaaggaaaagactatatcaattccgtttcgaaaaataagtacgaacccgcacttgccggaatagcacaggatattgaaaatactcataatgtggaaaatactcctttgttgaaaagtattattgaagagcagaaagagagtgtgctcaataaatctgtgacttcaaattttagtacaggaaaaagcaagtataccgccggtacaatgaaacatatttatcatggagaagttaataaacgcggtaaagcagttggctaccaccatgaaagcatgatgggcgggaagatataccaggtacagaaaagaaacctgacaaaaatggagtgtatatggcgaaagttgaagtcgggtctgtaaaaaagatagcggattcaagtttctttccaagagaatggaaccgcgctgatgtattaaaagcaattgacgaagcttatcatactagaaaacaagtacgttcaaataagtataggggaatcacttcaacaggaattaaaattgaaatgtatttaaatagtgacggaacaatagcaacagcatatccgttatataaaaaataatcttaaaggtgaccgtgacacatgaaatattcatacaggtttgataaagatccatttggtgatataaaaatagttttaccagaagaaatcagtcttttctctgacttcattgaaaatattacaacaatagaacaaactgatgagtatatagaatacattcagaatgttttaaatgggatacatgaggattttgaaattgatttaaatgggataagtgtattgataaaaaaagatgttaccgatgttgaaaacccttttttaatcgatgacccttataaaaactcaatagaaacagaccaatttaaagagttgttattaatatggagaaataaaattcctgaggtatttaaaggttaagtacattcactattcttcgcggtgaaatttgagtaacatgtcagacaccacttgccgaaaaggtcggaaagtatagttctgttctgagtgatccaaaaaacattagtaaaataaaaaaatggctctctaattctgataatagacctcctaatgccttaaacaagttacagacaaataaaacaacacattgaattcctcaagataaaagaaagcccttctcataagagaagggctttatctatgttttcaataggatagactgtcttcagtccatagaaaagcacagcgagattgctcgtagtcttccgtaaagtacgttcctttttgtcgcgttttcctgttctatttgcggacatattaccgcctccattcggttaagtcaccgaaataaaaatcgcttccttgtcgttggtaggaccgctaccctgcgccttaatacgactaagtcaacgcaataaaaaacggctagaaacgttgatataacgtctctaaccgcagtgtatgattccgactgggctcgaaccagcgacctctaccctgtcaaggtagcgctctcccagctgagctacggaatcatgatatgtatgtgttgctgggtatgttgttgtctctctgacatttataattatatatcctgatttctcattcgtcaacactttttttatctaaaataaaaaaagggcgcgtcgcaaaattgacggcgcccttttcgtttatgatctcacttggacaggggttatttttttcaatgcctgttcgaagtcccgctctaaatcttcggcgttttcgactccgacgctcaggcgcagaaggccgtctgtgatgccgcgtttctccctctctgctttcggcatggcggcatgcgacatggctgcagggtatgagagaatggattcgacggcgccgaggctgacggcaaataccggaagcgatacgttttcgaccagctttttgacggcttctttgctttccaattcaaaggacaggacggcgcccgctccgctcgcttgccgtttatgggtatcggctcccggatgtccggcaaggccgggatagtaaacgtttttgatggcgggatgtccgtcaaaataggcagccagccgctcagctgtccggctcgctttttccagtctgacctgcaatgtttttaagcctctcaatacgagccagcagtcctgaacgccgagcaccgctccaaatgaattttgcagcttatacagctgattgccgagctcttcatcttttacggcggcaaggcctgacagcacgtcactgtgtccgcttaaaaatttcgtcgcactgtggagcacgatatctacaccgagatcaagcggacgctgcagagcaggcgtcatgaaagtattgtcaaggtatgtcagacagccgtgatcctttgccagtttgacgacgcccttaatatccgtgatgccgagcgtcgggtttgacggtgtttccatataaatggctttcgtgttcggccggatggcgcgggcgaccgcttctgtgtccgtcatatcgacaaaggtatgttcgatcccgaaacgggacagaacctcagtcaccatgcggaatgttccgccgtacacatcctccgtgacgaggacatggtcgccttgggataagagcagaaacgccgtcgaaatcgccgccataccggagctgaaagcaaagcctctcgttccgccttcaagacctgcgatcgtttcttcaagcgctgttcttgtcggtgtgcctgagcggctgtagtcatatgtcccgaattcttcaaatgaagactgatggaatgtggaagcatgctggatcgggacgctgacggctccggtggctccgtctgttttaaatggattgtgcacgagctgggtttccagcgtccaattgtgattactcatatgacacggccccctcttttacttgctgtaatgcctgctttacatcccgcttcaaatcttctgcatgttcaatgcccactgaaaatctcagcagacggttgcagacgccgtttgcaatacggatgtcttcaggaatatccatgtgcgtctgtgtcgcggggtatgtaataaagctttccaccccgccgagactttctgcgaaacagatcgttttcagcgcctttaaaaacggattgacccattcctctttttgcagccggaaagacagcatcccgccttttccgggatataacacgtcggcgatttcttcttcctgttctaaaaattccgcaagttcacgggcgttttcttcatgacggcgcattctgagtccgagtgttttcatccctctcattaaaagccacgaatcaaacggcgaaagaaccgcgccgatcgcattttggtgattaaacatgatctcgccgagctcttcatcctttacgacagccagaccggcaaggagatcattgtgcccgcctaaatattttgtggcgctgtgaatgacgatgtccgctcccagttcaagcgggcgctggagcaccggggtataaaacgtattatccacaatcaaaagcaggccggcttctttcgtaatccgggcgattttttcaatgtccgcctcctgcattaacgggtttgtcggtgtttcaacaaataccgctttcgtgttttccgttattttggagcgtaaacagtcttcatcggtgaaatcatcgtaaataaagcttaagccgtattttctccattcgttttcaaacaaacggtacgtgcctccgtataaatcggaggatacaatcaattcatccccgcttttaaataaagccataatcgtttgaatggctgccattcccgagctgaaagcaaagcctctcgcaccgttttccaacacggcgatagcgtcttcaacgagctggcgtgtcgggtttttcgtacgcacgtaatcaaaacctgtagattctccaattcctctatgtcggtaagcggtggacagataaatcggcggactgaccgttcccgttgcttcttcgcttctatttccgatttgggctaattttgtatcaacatgctgcgtcatcagtaagcaccatcctttttcaaaaataaaaaagccccctcttcataagaagaaggagcttttctcttcctcttatcttccaagcatgtgaatcgcttgctggatttagcaccttggcactttgccttcccgcggcaaagcaaaccggttgctgaggtttcaaagggccagtccctccacctctcgtgataagaatattgttttgtattttctgattgttctatattaacgcactataaaatgaatttcaataactttttatttatctgaactctcgcaagaagtgcatctgaagaaagaaatttctaataattcatggtacaataggaaaaaaccatcaagacaagaagcggcctggaggaatgcgaagtggcatcaaaaaacggaatcattcatgagaaaaaacttttctcccatgagcttgaagaggaaatgaccgttttggtctacctgcccgccaccttctcccccctgtataaatatcatacggtcatcgctcaggacggccatgattatttcagattagggagaatcgggcggcaggcggaagagcttatgtcaaaaggggaaattgaccgctgcatcattatcggcgtcccttataaaaatgtgcgggagcgaagaaacacataccatccagaaggctctaaattcgcctcatataagcgatttatcgcaaatgagctcgttccttttatcgacaaagaatacccgacttatcaagtcggatacggccgcaccatgatcggggattccctcggcggaaccgtttcgcttatgacggcgattgactatccgaacatgtttggaaacgtcatcatgcagtctccgtatgttgacgggcacgtgctggatgccgtccggcagtcggaggatctcaaacagatttccgtttatcatcaaatcggagaaaaagaaaccggcgttcacacgacagacggccaggttcttgatttcaccgcgccgaacgaagagctcaaacagctgctggaaagcaaacagtctgaatacacgtatgaaaccttcgacggggatcataaatggacctactggcagccgctcatcacgccggcgctgaaaaaaatgctgtaaccattcatttaaggagggaactttcatgaaatacggtattgttttatttccatcaaaaaaattacaggatctcgcaaattcgtaccggaaacgctacgacccgagctacgcgctcattcctccgcacctgacgctaagagatccgtttgaagcgacagaacaggaaatcgagcaggtcgtatcacagctgagacagacggcgaaagagtcgcatccgctcgttctgaaaatcacaaaatacagctcgttttctcctgtgaataatgtgatatatatgaaagcagagccgacggaggaattaaaatctctgagtgagaaatgctactcaggagcattatccggcgagccggaatacagcttcgttccgcatgtcacggtcggccagaagctgtcgtcagatgaacattccgacgtactcggacagctgaaaatgctggacatttcccacgaagaagtcatcgaccgttttcacttgctctatcagctggataacggctcatggactgtgtacgaaacatttttattaggcggaggagaataactgcttggaatccatcatcgcaaaaactgaaaaacagctaaacgacgcttttttcgtcagaaaagaggtctttgttaaagaacagcacgttccggaagaagaagagattgatcaattcgaagacacgtcagagcatatagtcatatatgacggcggccagccggtcggagccggcagatggcgcttgaaagacgggcatggaaaattagagcgcatctgcgtgatgaaaagccatcgttctttaggcgtcggagccatcatgatgcaggcgcttgaaaaagcggcggcagccaagggtgccgacagctttatcttacatgcgcagacgcaggcggttccgttttacgaaaaacaaggataccgtgtcacatccggcgaagaatttctcgatgcgggcatcccccatctggaaatgataaaggaacacaaacgataaaatcaaaagcactcctgttatatggcaggagtgctttttttatgaaaataatactatttcatgaattttattgcattttatggaaagttaatgtatgtttagtatgcgaagtattacaattcatacaaaaagtacaattcatatttcggagggataaacatgacggcaccaaaaggaaaacacatattcgggactgttaaagtgggtacaaaaggacagattgtcattcctaaagaagcaagagatgttttcgatataaatccgggggattcactgcttatgctcggggatgaccagcaaggtatcgcacttgttaaacaagaactctttttcgagtttgcaaaagatattttaaacgctaagcaaatcgatgaagatagcgaggatgagtaaatgcacgcgattgagctgaggcaattaacgaaacattataaagaaaccgccgccgttgaccgtcttgagttctcagttgagaaaggggaatttttcgctttactcggtgagaacggagccggaaaaacgacattaatcagtatgctttgcggactcctttctccggatgacggtgatgcatcagtgcttggacacagtattttgactgatttggataaaataaaaccgaaattgaatatgtccccgcaggaaacagccatcgctcctcatctaaccgtgcgggaaaacttagagtttatagccggagtctacggaattccgaaaaaagaagcaaaaaaaagaacagatgagatgctcgaattgtttcaattaaaagagaaagaaagagcaaaaacaaaaacattatcaggaggaatgcagcgccgcctcagcatcgcaatgggaatgatcaccaagccggatatttatttcttagatgagccgacattagggctggacgtccgttcacgccgcgagttgtggaaaaatcttgaggcattaaagggtgacatgacgattattttaacgacacactatttagaagaggctgaagccctggcagatcgtatttgcattttagaaaatgggactttaaaagcactgggtacggcggaggccctgaaaaagcaaactcattcagctacatttgaagatgcctttttagcgatttgtgacggggaggcgggtctttatgcttgatttcgccattcgcaaccgcaaagaaatttttcgtgaccccctgtctattatccttggaatcgcactgcctgttattctattgtttctgtttacggcgattgaaaaaaatgcgccgcttgatacctttaaaattcagcatttagcacccggactcattgttttcggtttcgctttccttacgatgttctctgcattgctgatcgcaaaagacaaacagaccgcccttttgacccgtttgtttgcttcccctttaaaaacagccgattatgtcatcggttatgcaatgccgatgatgccgttagccattttacaaatcgtcatttgttttatcgcagctgctgctgccggtttatccgccgagtggatgaatcttctcgcaggtatcgctgtcttgctgccgattgcgatgatgtccgttttcttcggtttatgtttaggggctgtgtttacggacaaacaaatttcaggtatcggaacgatttatattacactcgtgcaatttctgggcggggcttggatggaggtgagcctgctcggtgacacattcaaacatatcgcttatgccttaccgtttattcactcgatcgagctggcccaggaagtcataaccggagattattcttcctttcatcagcatatttggccgatagcgggatataccgttttggcgcttgcacttgctttcctcagttttatgaaaatcaggaagagataaaaaaagccggcactccgtaatgggagcgccggtcttctttattacgtttctttcagaaggtttatcgtatgcggcagcagacgatcatcccccggactgccatggcccggaacgacaatgctgatgtcctgatatcttttcatgactttgcggacggcgcgcggccacttatccggataaaagcccggagtaggcacgatttcctttgtttctaaagccttgattaagcaaccgccgaataagagcttatcctcaggcagccagacggacatattgtcttccgtatgcccttttcccggataaaacgtttcaattttcatatcgccaaactgcagctttgtcacgtttttcaaatctccgagcggccggtcatatccctgctctcgggccaagtcggcggtcagcttcgtgctgtgcacctttacgccgtatttgtacagggtgttcagcccgccgatacgatcatcatgggcgtgtgtcacaatggcatcggtcatccttttgccgggaaaccgcttttttatttgtgtcattaattgctctgtgagactgtcattccacggagtatcaatcagtacgattcctttggaagtctcaagaagcaatccgttcgcagggacgggacttccgtctgccgtaccggtgcttgtatgcatccaaacatgcggcgccagctgtatgagagtgacatcttttgctgcggggccctccgcagcgtctgccggtttcattccggcagtaaagaggccgaatagaaataaccccgcaattcataatgaaagctttctcaaattgaatcattcctttccgcatctttcatatatacgactcaaaaaaacccggatatatccgggctttttcacacgtattgatttattaacctgccttttcccatgatttgcggcagacgggaaagagagcgcttacgtttttcctcatgtactttcttttctgcggctgcggtgttttcctggcggcgctccacctctctgtacaccctgtcattggcgagggcggccgctttcgtaatgctggcgtaatcaggcttataacccgctgcccggtttgcgtattgagaatactgctggttttgaatccgtcctgcataaatcatatgtacccctccccttcgcttttcatttcccttaatcttactttttgaaacgctgttcttttgttatgatattctttgtctatcaaatggatgaacaccttttaatgggaggacccctttttgaaatgcgcccgactgaataaccgaacgatacatttacatacatattctagagaacattaccaattcctttttgaagaagctcagaaaggaaatattttttgcgcacattgtgagcagcccgtcttgatgcggctttcgattttagagcagccggcattttatcaccggcaaaagggagacttcaccgcctgtgaaaaagcatgcgcggccgaggaaccactagcggagaaagaaaaagaagagtataaggaagccggcatgttccgcctgccgaaaggaaaagcgatttcagagaatccgaaaccgatcgtctcagaatggaaaagcccgaaaaaagtgcctgcggccgaaccgttttcaccaacatccgaggcggctgatacatctttgttccccggcatcggcctgaaccgtgaacagatgaaggcagttactgaaacggacgggcctttattagtgcttgccggagcgggaagcggaaaaacaagggtgctgacagcacgcgccgcccatatgattgaacacctcggcatttcacctgagaatatgctgcttgtgacctttacgacaaaagccgtcgccgaaatgaaagagcggatggcaaatgagtacggtctggcagccggaaaagtctcccgtctcgtgacaggaacattccacagctttttctataaaatactctatcattatgattcttcaaaatggaacggcagccagcttttaaaaatggagtggcaaaaagagcaatatgtgaaaaaggcgctctatgaagaaaatttggatgaaaaagagtttcccgtcgaccaggcgcttcagcttatcggctgctggaaaaacacgtatctcccccatgagaccattccgcttgcggacgactgggagaaaaaagtgtacaggctctacgaacattacgaacggcagaagcgggaaaaacggcaatttgattttgatgacatggcccaaggctgttatgaactgtttcaaagccggcctgatattctcgcgcagtaccaaaacagattttctcatattttgattgatgaattccaagatatcaatcctgtccagtacaacattatgcaaatgatcgcaagccctgagaataacctgtgctgcgtgggtgatgacgaccaatccatttatgcattccgcggcagcagcccgtctttcattcttgactttcaaaaggactatccggcagcaaagaccatttacttaacggcaaattaccgctcgccgcatccgatcgtctcaagcgctcatgccgtcgtaaagaaaaataaaaaacggtatgaaaaaacactttctgccgtcaaagacggcgttcacaatcccgtgatgttttttccttacgatgaagaagaagaagcgaccatgatcgtttcggatatgaaagagaaaattcaaaacggggcgagtcctgacgattttgccgtgctttaccggacaaacagcgccggacgggccatttatgaaagactgcaccaatcatcgattccttatcatgccgaccggggcgtgcagacgttctacagccgcagaatcgtacgccagatcctcgcctacttatatgcgagtcagaatgaagatgatccggatgcggtgaaagacctgctgcccgccttatttttaaagcaatccgccctgcaaacgttaaaggcgctgtcaatcacggaagattgcacgatgattaaggcactgacgaaactgcctgacttgaagccttttcaaatagagaagatcaagcagatcgttccgtttttcgcaagcatccggacaatgaagccggttgaagccatcacctttgcagaaagcaaaatgggtttttccgagtatttaaaaaaacggggcaatgagggaaacaaactggaaaaaggctctgatgatctcagggatgtcaaagtggccgcaaaaaaattcaaaaccattcccgattttcttgcgcatgtcgatcatatgcgcgccgctgagaatctgaaaaccgatgaaaacggcgtcgaactgctgaccattcaccgctctaaaggtcttgaattcaatacggtctatattttaggcgcggctgacggctcgatcccccatgacttcgcacttgagacggcgagacagggcgatcccgctccgctcgaagaagaaagacggcttctgtatgtcgcaatgacaagggccatgcagcatttatatgtatcttgtcccgcgtacaggcggggaaaaacagcgcgcagctcaagatttctcgagcctcttcttcggacggacagacggagcgcactcaggatataaagaacccggcagatcactgccgggttcttctcacataaaaaggcctttttagcaaggccggctgacgcctatttattgttcagcattttagaaatggtgccaaaatcaagtttctctttaccgcttgtaatagattgaacgattttgtcttccaattctttcggaacacgcttgttagccagctgggacaccttctgaatgacgcctctcaccgtgttttcatctttgaaattggcattttgcaatgatcctgcaaggttcatgacatccttcatgctgacgcctgttttcttctcaatatttttgaaaaattgattatccatggtgtgcctccttttgtggagtaatacgatattgtatgaataaagagcggaacatgtgcccgtaagacaaggaaaaaattccgagtgccccgtctctatactccttcatacatcagggaagcacgggactgaacggtcccgcgcttatccaaggtcttgctaaggtttagccaaaaaaggatgcaccgacaatgatcagaaggatgaacaatacgacaacaagaacaaatgttgagccgtatccgcctccgacatagccgcctccgtatccgccgcagccgccataaccgccgtagccgccgccgaatccgccatatccgaatcccatatctaagcacctcctttactctctatactctatgtgagccgacttgtttggcttggataaatgcatagggccggtgcggatttcgttcattttagtgagaatgctcatttttcttcagttttgcttctgtttcggcggcaaacacatctatccattcctcaaagcgcgatcccgcttcatcaaactcagacagctgtttttcaatagataagatatatttgtcatgctcccgctggttttgattgtgccggcggtatttaccgtttatgaatgattcaaatatattcataacatcccctcctcctatgatctatgccaaacaggggccggcgttcggcaaaaaacaaaaaaaccggaagctccggttttttagaaaacggctatttcggttttttcttttggccgcagccgcagccttttttcttgatttttttttcgtaaggctgatgcacagttgatttgtatggagaatgttgggaaggtttgcttgattgattcatggtgatccttcctttccttatgtcatatatgccagtttatgccgaaagtgacggtaagttgctggtggaaccgccttattcctgcagaagacgggaaaccgcagcttcaatgatcccggccgcgccagctatggctaacagcaaaatcagccattgcgcagcctcgggtatcacaatctgcgccgcaattaaaaaggcggcacaccacacgcccgtacaccagtagcagctgagaagttcaccgataaatgccctgatgcctttcccttttatgacaatgtaggtttctgtcgtgccgtctggtgcggtttctgttttttcctcgtgaaaaaggctccgaagcggcgccataatggtgtcaaatacgaaaagcctggccagccggaaaacggcaaacgataacagaataaatgaaagccaattgataaccacctgttcactccttttcaaaacttgacctctttatacatatgcgaaaaccctgatcttcatgaatcgcaccttgtccggtaaaaaaataggtgcggtttagttgtttttcttattccgctcggcgtttcatttgcattatataaagtatgaatgagaaaggagtgaaggttatgtcgtttgaagaaaaagtcgaaacactgcaaccgcaaatatacgaacaattatccaacgaattcgagcagacgatcgaagtgattgattgcgaaaatgtcacaatagatacaacacatataacggccgctctttctatacaagcctcagttactacggcgattatccttgcgacacagctcgcgatcgcagatgaagacacagccgaccaaatagcaaccgaactgctgatcctggatgattgccaaataaaaaagaggaccgtcattcaagtcctgaacagccgcaatattaaaatcacactgactgcagacgatattatggcctttgtacaaattttgtttcaattattaaatatactttttgctgaactagacatcctttaacctttcttttcaaatatttaaatagaggtgagaacaaatggcagataacgaaaaattcaaaaaagaactcgaaagtctaccagaagtggacccgcttttaaaagtgcttgtcagcaatgtcttcaaaaagcacggcgtaacaaaagataaaatgcgggaaatacctgatgaagaaaaagaaatgctgatcgcattagtcaaagacatgcaggcgaaatcacaagcttttcttgaaagccagaaacagaaaaaagagcaggaaaaagcacaagaacagcagacaaatccgaaaacccgcagagaacaattaatcgaacagctccggcaaagacgccaaaattccggtcaataactaaaaaatagtgatttttatcaggataaatgcctgagtcaaagtaaggggccggctcatttaataatagtaaaagaaaaggaggaatagatatggaaagcagaccatactcttgggttgcacttgatcccgaatgcgaacatccgcgagaagaaaaagaagaaaaagaaggcagaagatgcagtgtttgctgtaacggaaacggattcggcgaagataatgccttcatcgaccaagacttagcccaggcgaatatcaacaaacaagtttctgaagaagcgattattatcagagactcttgcgatattaacgtaacatcgacagacgttcaggcagtcacttccgttgtaacagcgcttaatgcagcagtcgtaacggccactcttacttcaatcgctgacggagtcatcgctgaattggtcgcacaagacttacttcagctaacagctaacaaacaaatcaaccgccaaaaactgctcatcgaaaactcccgcggcgtaaacgtgacaacagtagacgccgatatcgcaacgttgatttcaacagcgacaaatacactggttgccatcttagtcatcacccttgtcctctaaaaagaaaagcagagctaaaaatgctctgctttttcttattttctccgcatatgatgaatatatagacgttcacccacaccaagtgaggctcgcgtacatatgttgttaaagacaaaagtcaaataccctaaaagaaggagctgaaatccatgagctgcggaaaacaccatggccgagatgaaagttgtgtatgcgatgcagtcgagaagattttagcagaacaagaggctgttgaagaacaatgcccgactggatgctatacgaatcttttgagcccgacgattgcaggtaaagacaccattccgtttctcgtatttgataaaaaaggcggattgttctccacattcgggaacgtcggaggatttgcggatgacagccagtgctttgagtccattttctttcgtgtagaaagactatgcgattgctgcgcgacgctttcagtattgcgccccgtagatgtgcacggcgacaccctcagcgtctgccatccttgtgatcctgatttcttcggtttagaaaaaacagaattttgcattgaagttgatctgagctgcttcagcgccattcagtgcctttcacccgagcttgttaaccggcctgcgccgcacaaagagaaaaagcatcacggatagtcattgattcgcatctttcctaaagaagaatccccttccaaccttctattacagatgcaatcatcagcccgcccggacttccgggcggctgactctccgatatcgtttaaaccggtaccatttaaaacgtgaagtcaggagggatattatgagcaagcatacaacatactgtgtgcgtgaagcggtagaaaatattgaagacctgcaaaatgcggttgaagaagattgcccgacaggctgttattctaaacttttatctccggcttatacattaggcgatacagtaccgttcgccatcttcacctcaaaatcgaaaccgttcaccgcattcggaaacgtcggcgagctggataacggtccgtgctttaataccgtttttttcagagttgaaagggtctgtgacggctgtgccacattaagcctgcttattgcttttgacgagcataagcacattcttgattttacagataaagactctctctgcgatgtattccgtttagaaaaaacgaactattgcgttgaagtcgatctccatagcttctgcgccatcaattgcctgaacccgagactgatcaaccgcacacattcttaaatcaaaaagcataaaaataagctgccggatgaaagcattcaggcagctttttgtatggttaaaatccaagcggatgcagcgaggtaatatcgtctattgcgagttctgccggcgctccgttgcttgtcgtccgcaggaagatcgcattattttttctgccgacgattacgcctctgtaggttttcccgttggcttctatcagacaaagggtccgcggcatattatgcggcagcttcgttaagaaatcaattttttcaagaatggacattctgctcatcggctttttcacgcgctttggcggaaccttttcctctggggcggcattgtgaaccgcttcaggctctttttcagcggcatcaggctcttttttagcggcgtcaggcttggcagtgtcctgctccgcttgcgccggaacttcttgaacggcttcttctgcgcggctgtgctgttcaggtacttgcttttctggctcgacagccactgctccttcaggctgagtttgacattcttcctcccgctttccatgcatcggctcttcttccggcggctgaggcgctttcctttttttgattaatatgtcctgcattgatgattgcgtgtctgaataatccgcctgaacaatatacatgagcggttttttttccgcgtttctgttttgttttgacatcttcatccctccgattctgtcatgttttatttatatgacggaatgattaaaatcagaagaaagaaaaaagcaatccccgaaagggactgcttgttatttaacgtgcggtaatatggaatcctgaatcaacgtgaagattttcgcccgtgatgcctcttgacaggtcactgaacaagaatgcagccgtgtcgcccacttcttcaggtgttgtcgtgcggcgcagcggcgcgcgctcttcaatttctttcaggatggagttgaaatcactgattccttttgcagacagcgtgcggatcggacctgctgaaatgctgttgacgcggatgttttcttttcctaagtcagccgctaaatatctgacgctcgcatcaagagacgcttttgccacacccattacgttatagtttgaaacgacgcgctctccgccgaggtaagtgagtgtaacgatgcttccgccttcagtcataatcggacgcgccgcttttgcgaccgctgtcagagagtaagaactgatgttatgcgcaagcaggaatccttcgcggtttgtatttaaatattcgccgacaagctcttctttgtttgcgaacgcgatgcagtgcgcgatgccgtgaatcacgccgacctgctctttaatgctcgcaaagcaagtttcaatctcagcgtcatttgtcacatcacacggaaggatgatggaatcatttctttctaatgtagccgcaaggtcatgaactgatttttccaagcgctctcccgcgtaagtgaaaatgaggcgcgctccggcttcatgcagcgaacgggcgattccccatgcgatactgcgtttattggcaacgcccatcacaacgatgttgcggccttcaagtgagaaattcatatgtataaagcctcctgtaatcgtcttaaagacatagttttagtacctgatcttaatttttatcatatcataaccttgtccagattgaaagcatgggaaaaagaccgcggatgttgaagcggtctcttttttatctcgtctgcagactgttccttttaaaggcaaaatgattggtcgggccgtgtccctctccaatgccgagcgtatgttccacggcttcccgcacaaaattgacggctgtctcaaacgcggtctgaatgtttttcccctttgccgtttccgccgtcagcgcggctgcgaacgtgcagcctgttccgtgggtgtgtttggtgtcaatataagcgtggctgatttggataaaagacgaaccgtcaaataataaatcaacgatcctcccctgttcaggctggtgtccgccttttatgatgacatgctttgcaccaagcttgcaaaggcgttcggccgcttttttccggtcctcaaacgtgcggatttccattcccgtcaatacctcagcttccggaacattcggcgtcaccgcatagctgcgcggaattaacagctcttttaacgcggcctgagattcctcacgcagcagggaagcgcctcctttggcaatcatgacggggtccgtgatgagatgatcaagcccgtactgatccgttttttccgcaatttccgcaatcatttccgcgctccacagcattcccgtttttacagcgtcaggccgcaaatcttccgccaccgcgtcaatctggctgcccagcgcttcccgggtgagcggataaatgccgtgaacgcccaaagtgttctgggcggttaccgctgtaatggctgacatcccgaaaacgccgagctcctgaaaggttttgagatccgcctgtataccggcgccgcctcctgaatctgatccggcaatcgtcaatgctttgcatatgctcatgatgtttttcgctcctttcgcattatccgatccatttatgataaaaggatttcgctctgctgatatcacttgtgccgtgtattaatgctctgccgtcacgaaacagtaccatcttgaaattgtctttgcaaaacgaaattaaatacgggttggctgaaacatcaagccctgtccgtctgagctgtcccgcaagtttttgcagatcaaactgttcagagatccccgctctgatctgcaccgtgttccgcccgcacagaaccgccgcttttgtctgattttcataggataaaaacggataatcgttcgtgccgcagcttgggcaatcagccgacctaagacgggcgacgtttatttctgaccgttcatttttccataaatcaaaggaacggagaacatgctcgatagatccgcccgttaacagcttcagcgcatctgctgcctgaaaaacggccgtctgcaatacagccgggctgatgattcccgccgtatcgcatgtcataccgcctaaaggcaatgtctcaagcagacaatgaaggcacggcgttacaccgggaatgacggtaaaagagagcccgtagctgccgacacaggcgccgtacagaaagggaatccctttctgcacagccgcatcattcacaatcagcctcgtttcaaagttgtcggcggcatccacgatgagggaggcgccacgaatcaatccgggtgcgttttccgcagtgacatccatgacaaatccctcgacatctacatcactatttatagatcgaagccgtttttcagccgccgcggctttcggcatttcctgtctgacatcgtcttcggtataaagctgctggcgctggagattactccactccacataatctctgtcagcgatcgttaccttcccgactcctgctctgacaagcatctccgcacttgccgtcccaagcgcacccgcgccgataatcacggcatgagacgaccggagcttctcttggccggagagaccgatcggctgaaacagctcctgtctggaatatctgtccgtcataccggaagaccgtctcgcggactgcttgcagttccgtaatctttcaccggaattctcccggcttcataagaaagacggcccgcttctacggcaagcttcatcgccctggccatcttgaccggatcaacagcgcctgacacagcggtatttaacagcacgccgtcagccccgagctccatcgcgtaggcggcgtcttttgaagatccgacgccggcatcgacaatgaccggcaccttcgcctgttcaatgataaaggatagattcagcggatttaaaattccctgaccggaaccgatcggcgaagcgcccggcataatggcatgcactccgagctcctcaagacgtcttgcgagcacgacatcgtctgacgtatacggaagcacgataaatccctcttcgagcagctgttctgatgctttcagcgtttcaaccggatcaggcaaaagtgaccggctgcatccgatgacttctacttttatcatgtcacaaagccctgaagctttggcaagccttgcgattcggaccgcctcttcagccgttgcggcgccggccgtattcggcagaagcgtgtatttagacaaatcaagctgttcaagaaagttaggctgagactcttcaaagatgttcatccgccttaccgcaaaggttaaaatatctgattccgagacagccaccgcctctttctgaatctcaaaactcggatattttcccgttcctaacagcaatcttgactgaaactgttttccgcctatcgttaacatcctcatccgcctcctacaaaatggacaatttctatgacatcgcggtcacacaaactcgtattttcataattctttttttcaatgatttctttatttctctccacaactacgattctttgatcaagctggtacgattcaagcaaatcctgaaccgtcccctcatttcgattccaatcaatttgttttccgttcagctgaaggatcatatatgaacagcctccttgcgatcaattcgaaacgcttcttcccattcctttttaatctgtctttccaggatcatatcccgcaccatttcagccgttgccggcgccaacaggatgccgttccgaaaatggccggcagcgaagatgatgccgctgtcttcaggatgccgcccaataaacggttttccgtctcttgttcccggcctgagacccgcccaaaaccggtctattttcatatgttcgatggcgggaagcatggttttcgcttttgcaatgacggcctcaattcctccgatgtcaggcgtatcgctccagtcgccgtgtttcatcgtggcgccgatgacaagccggccgctttttctcgggacgacataacaatgatcatggtaaagggttttgatcagcgggatatcgtcattccacacggaaaggcattctcctttcacaggaaaaaaaggctgtcccaagccgagctggctgaaaaaccggccgctccatacaccgcttgcaactgcgactttgtcagcataaacatccccgccggacgttgtgatgcaatattctccgttcacccgttttacggaggtgacttgtgtatgctcatatatatcagcgccatagcgccgcgctccttttgcatacgctttgcagacatagtacggctcgacatggacatcgtcttttataaaacttgcgccgagaatgtcttttgaagcgtaaggctctttttcaagggcatcttccgctgaaagccaagtgacggaaggcagatcatccatcttccgcagacgggcgatatcttcttcggtatacgccagtttaagcattccgccgttatggcgcctgatgtcaatgccgcaagcttcctcaagctcttgccccgccgcttcatacagcctttgactgtgcatggcaaaatcaaaaaacgcatcccggttttcacattccgcatgagcgcccagcattcccgcggcagcgcttgtcgtttttcggccgacttctccggcttcaagcaagacaacgttctgctgcgtcttcgccagctcataagaaatggcgcacccgataattccgccgccgatcaccgccgtatcatagtgcttcttcataatcggcctcccttaccgcgcgtgcataccgctttgccgcctcctcaggattttcagctgagaaaatccctgacatgacggcaattccgtccggtttcgcctgctttgtgtgtccgatcgtctgcagtgtcattccgccgattgcgatgacggggatggaaagcgtgcgtttgatctctgaaagcaggctgatgcctcttgcttcaagtccttgtttacattcggtttcaaatacatggccgaacaccacataatccgcatcttccttttcagcttggatggcttctttcagcgaatgaaccgaacgtccgatatgaagatggggaaatctgcttcgcacctgctttacggaaaagctgcgggacggaagctgaacacggtgtatattggcaaaaagcgcgatatccgccctgtcattgatgatcaatttgtccttatccgcaccgccctttttcaaaagggtcaaaagctgcatgatttctcccgctgttttatcccgctcacggatatggataaagcttacttcgcgctgaatcgaaagaatatcctcggccagctcggcaacgggtttgcgattatcagttaccgcgtgcagctccaaaagattccacctcttttccgcccttctcggaccagccttctttttgataggccattccccaaaattgatattcataatagcttgaaatcacaaaattctctttcattttcgcgcggatgtcctctgtgctgttttcagcaatctcgtcaaaacggctgatctgttcttcgacttgctgtctgaaccagtctccgccgtatgtaccgatccatttttcataaatcggatgctccggtttgcactcctttaagtgctcgccgacttcataataaagccaataacagggcagaagcgcagctaatatttctccaaaattgccgctcatcaccgatctgtacatatgagacgtataagaataggcggtcggtgccggtttaaatgccgcacgctcttcttccgtaatccctaaaagctccgtaaactcgcggtgcagcgccatttccgcttcatatgtcccttgagcgtggcccgccatcctgcccgtcgtaaacaagtcttcggcatatgcggcgccgaacgcctgaacttttgcaaaatgcgtcaaatagtaggaatcttgcagcacgtaatagctgaaacgatctatcggcaggcttccgtcaccgattcccgttacaaacggatgaacaaaacttccgtcccaccattcggcagccgcctgtctgcattcttcagaaaatgtcattatgtcttcccccctgataaaataaaaaaaaccaccttcccgcatcggaaaagtggtttggaatttaaatggataaaaggaaccccaaaaaaataccgctccacttccctacgcaggtctgaacctgttcaagttatgagggtctaaaagtctcacttttatctcagcccttatgaaggacacccctagtggtcatacgattattgatttatttgttatgccttctatattatcacgaattgcaatttggtcaagcttcaaggatttttctcagttccgacacgtagttgcgcgagcccgtgacgatgagacggtctcctgttttcagccgcgtgtctccgtgcggaacgatgctgtccacacctctgaaaatccggacgaaaatcacatcgcccatcagcggaaattcccgcagaatgatgccgttatacgccgggttttccagattgatctgatataacgaagactcctcattcgtcaggaggctcatcacgcccggcgcctcaattaatgcgcgcaagagcgtctttgtagacagaaggatagaaaaaatactgatgccctcttctttcagttttgtttcatgctcaaccgagccgacgcttgcgatgatacgctcagtccctttctctttcgctattaaggcgatttcggcgttcacatcttcatttcccgtcgccacgacaagaatatccgttttgaaaataccgtgcgactcaagcgttccgggctcgtaatcagaaatcgtgtcaaccgaaaaaacggattccgcaagcgtttccccggcattttcctgatacacatggacgacccgtacttcatattcctcctcaggcaattccagcgtaaccggaagcgtcatttggttggcgccgataaatgtaatgcgctttttttcctgcggcgcactttgccgtttgtataatttcttaaagccgatcggtgtgatgatgctggcaataaccgcaactaaagtcagcgcgccggacatattggcgctgataatgtggagcctttctccgatcgtagccgccgcgataacaagcgacagcgtggacgtcagcaaaaagcccgaagcaaacacggttcttttgtcataccatttctttaagtaaaacacagggaacatcttgctgataaacagcgcaagcagaagcagcggaatcatcgttaatgttttcggatcttggaagagcgtccaaatgtccaatttcaccccgaccatgacgaaaaagatcggaattaaaaacccgtagccgaatgaatccagctgttccaccatttctttattcggagacagaagcgataccagaacgcctgccaaaaacgcgccgagaatattttccgccccgagagattccgataaagcgacaagcacgataatcagtgtgaaaatggctctcgtgccgatctgcacggtgcctttagacatcgactgcacaaatgaacggtgtttaaagatcctgccgaagaaatacagcacgacccccgcggcaaagagaatcaacagaagccacatatttccgctgtcttctccgtaaagagaagagaagaaagcgagcagaatcatcgtagccaagtccgcgataacggcgacaagcaggatgatctggccgatattggagttcataatccgttcttcctttaaagtcgggaccaccacaccgagtgatatcgtcgaaataataagcgtcattaaaaatgcgttttgaataaaaccggctaatacaaaggcataggacagcagcaatgataaaataaagatgccgaaaaagataatcagtgcggcagaaaacgtgtttggcgcttccttgccattcggaaggaattgttttttcttccctttctcaaatgaagaaaaatcaatttccaagccgcttaaaaacattaaaaagataaagccgagaacagacagcgtctccagccacgtgtctccctgaacgacaagattcaggccgctttttccgataataagccccatgatgatctccgcgacgacgacggggatgctgagcttaaaccgatgtaaaaggagcggcgtcaaaaaagcgacgatcagaacgacgactaaagatgcgactgatgtgtgttccattcgtaaatacctccttaaaacaagggttataaaagcccgcttaaagcgggcgaaaccttacttttttttaaaaacataacgcatattctaacaaggctgaacgcgaaaaaaaagtgataaggctttatttctttaattctttttttaatttgtgcaaaaacagcgtaattaggtataggaattagccccataataaataaaaaaccgttaataaggaggctgacacgaatggcttatgacatcatcagcgatatacacggatgttatgacgaaatgatcgcgttaatgcaaaagctcggatatgaagtcaaagacggaacgcccgttcattctgaaggcaggacgcttgtctttgcgggggatttaacggacagaggcccaaaatccgtagaagtgatgcgttttgtggcaaaagcatttgaaaaaggagccgtccgttatgtcccgggaaatcattgcaacaaactgtaccgttacttaaaaggaaaccccgtaaaagtgatgcacggactggaaacgacggcagccgaactgaaagagctgtctcccgccgacagaacggaagtctccagacaatttatccgcttatatgagtcagcgccgctttatgacattttacataatggcgatctcgttgtcgcccacgccggcataaaagctgacgatatcggtaaatactcgcgtaaggtaaaagaatttgttctgtacggcgatatcacgggtgaaacgtatcccgacggcagacccgtcagaagagactgggccgccgcttatgaaggcaaggcatggattgtttacggccatacccctgtaaaacgcccccggatcgtcaaccgtacaatcaacattgatacaggatgcgtcttcggcaatcaactgacaggctttcgctttccggagcatgaaaccgtctctgtggaaagctcaatgccctatgatgcttcacgatttcgcgaggatcacggaaggcaggcatgaaaaaaagcccgaaaccggcaaacggttcgggctttacatgtgttcaattaatgttttcatatcgtcaggcaccggagcgtgaaaaacgagcgtttttccggtcatggggtgtacgaatgaaagccgctcactgtgaagagcctgccgcgcaattccctcattttttccgccgtacagtgtatcaccgactaacgggtggccgaggtagctcatgtgcacccggatttgatgcgtccgccccgtttccagccgcagggctgcaagcgtaaacgcatgtcccgctttttccgtttgaaaatgcgtcaccgctcgttgtccctccggcgttaccatccgctcaataatactgtcgtgttttcttccgatgggcgcgtccaccgttccttccttctgcagcatgaccccatgtacgacagcgagatatcgcctgctgacaagcccctttttctgcgctgccgacaaaagagaatgggaaagccgatgtttggcgatcagcatcgcccccgatgtatccctgtcaaggcgggtgacaagatgaaccgttgattgcacgccgctttttcggtagtggctgatcactccgttagcgatgctctccgacgggtgttctcttgatggaattgaggagacatacggctgtttattgatcacaagcacatggtcatcttcataaagaatatcaagaggaaccggctcaggcaaaagcgtttcactcacatgctccttcggaaattcaatcttaagcacgtctccttccgctaacacggcgcggacggttacatgctctccgttcacaagcaggtctcccccgccgaatttaatgtcagcgagaagccgctttgaaatgccgagctgcgccgtatattcttttaccgtcatgccggcttcccgggcagtcatgttcatttgaataaaaaagttgtccaatccgtttcctctttctattcgccttttccgataaaggagtcctgcacccttttccaaaacggaaaaggacggaatcttgcaaatctgactttttcatttgccacacggcatagaatggacttgacatccttatgcagcaaggttaaatgatcaattgtgacttgaaagtcgacgtcgtttctcggtttgatgacacagttatgatgatcgggaagcaaaagcggcgagccgacagtcctgaacactctgttgttgatggatgccatttcagcaagctgaatcgccctgatggaagggtggatgatcgcgccgcctaacgccttattataagccgtgcttccggaaggcgtggacagacataaaccgtctcccctgaacgtttcaaacagctggcctttaatttccacgtcagcgacgaggctgccttctatgcttttgatcgtacattcgttcaaagccagataccgctcctcacgctcttcatcatgataagtgacaatcacctcaagaaggggatactccacggtatgatacggcgttttggcaatggccagaacgagtttttctatctcctgcggaacccaatcggcataaaaacccaaatgccccgtgtgaactccgacaaaagccgttttatcaagacggtcgctgtacctgtgaaatgcgtaaagaagcgttccgtcaccgccgacggaaataacgatttccggctctttttcatccaaggtcatatcaaaatcgagtaaatacgcctgtattttgcttttcagtgtatctgaaacctcgtctccttttgaagaaacggcaaatttcatgccattcccctcctttcctactggcggtctcccgcttttttctttcgcgagaacgcggcttgggcttcctggatttctccgcggatttctgacatttcttcatcgagccgggatgcggcttctgaggcccgctgcagcctcagctttactttttcgggaatgtttccgctgtatttgtaattcagtgaatgctcaatggttgcccaaaagttcatggcaagcgtccgaatctgtatttccacaagaacgtgcttttctccggacgttgtttgtaaaggatataaaacgacaaggtggtaagaccgatatccgctttccttatgctctgctatgtaatcccgcttatccacaacggtaaaatcttttctggcaaacagcatatttttgacgatctggatatcatcgacaaattggcacataatacgcagccccgcgatatcctgcatcgtttcaatctgatgaagcggtatgctttttcgtctcgctttttcaagtatgctcgccaccggcttcacgcggcctgtcacaaactcaatcggtgagtggtcatcttcatactcataaagggttctgacgcctttcagcttcacctttaattcttcaacagcctggcggtatggcgctagaaattgctcccattgtttgtcatccatcgtacatcccccaattccgaacctgttctaaagaaatacgtttttcactttttcttccatatctccgtagtttgcattatctttaatattttcaagaagataatcgagttcttcatgcagccctgaaagttcaaccgtttttccgccggcctcaaggaccgccggttttctttggtctaaggcttctttcagatccggccagatatgttcttttataatgacatattcaaaagagtcagctgattcaagtatgtatacaaaagcaaagtgatcggaatcaacaagcatttgacctgaggctttgcgttccgctccgcttaagtcctctccgcacttcaagcggagcgcgtcttctgttaatgatgcattttggatttcaattctcttttgcataatgttctccttttttaacaaagtacagcatttattttatcatatcaaggtcgatattgataaacgtaacctctaaagagataatgggaattatacaatttttcgtcctgaaaggaagactgtcatgacccaagaaatagaaattgaattcaaaaacctgctgacaaaatcagaatttctgaagctgagtgaagcactctgcatgaaagaacatgattttaaacagcaggtcaatcattatttcgacacgaaagatttttccctgaaacaaaaaaaatcagcactccgcatccgagaaaaagacggcgcgttcgttctgacgttaaaagagcctgccgcggtcggtctgctggaaacgcaccaagagcttgcggcatctgatcttgacgtcttcaagattccggatggccccgtcaaacgtcagctggaaggtctcggaatcaactcagaacacatttgctatttcgggacgctgtcgaccgcacgcgcggaaaaagaatcagaaaaaggcttaatcattttagatcacagccgatatttagagaaagaagactttgaattggaattcgaggctgctgactgggatgaaggaaaacgggcgtttgaacaattgctcaagcaattcggcatcccagagcggatcacgaaaaataaaatccagcgtttttatgaacagaaacaaaaaaaggtggaatgacacagtgaatataacgaattgggcggcccttctccagctgcaatcaatggcgctgcaatcaatctctcatacaagcacggcttcaggcggacaatcttcagaaagcccgcttgccaatttcagcgcgctgctcagccagtatacggacacagccgtccggcagcagccggaatcaggaattttaaacggcgtgcggaccgctcacgcttcttattcaccgagaattcccgtttcatccggttccgcggcagcttcacagaccgcttccccaagcataaagtctgcgaatgcggcttctgacatcagcaccggaaacttttcaatagacagcgccattcagaaagcggccgaaaaatacggagtggacgaaaagctgatccgcgcggttattaaacaggaatcaggctttaatccgaaagcggtcagcggtgcgggggcaatgggactgatgcagctcatgccttccacggcagaatcactcggggtgtcaaacccgcttgatcccgtccagaacgctgagggcggcacgaagtacttaaagcagatgctcacgaaatacgacggaaatgtatctctcgcgttagccgcctacaacgcaggccccggcaacgtagatcggtacggaggcattccgccgtttaaggaaacacagcaatatgtcaaaaacataaccaaacagtattacgcgtaaaccagagaggcttccttcgccctctggtttttttgcggagtgaaatcttacacatgaatgaaggcgatgtgatatgatatgaaatacaagcgcctgacagaaaggcactttgtttgtagaaataaaatgttattgctaaaatatacagtaactgaagatagtaaaactgaaagataaattcgcaatgggaattatgattcctattagccatataaaggagtagtcaacatgggacaatcgtttaacgcaccatatgaagcgattggagaggaacttctatcgcaacttgttgatactttttatgagcgtgtctcgtctcatcccttgctgaagccgatatttccaagtgatttgactgaaacggccagaaaacaaaagcaatttttaacccagtatttgggcggacctcctctttatactgaagagcacggacatcccatgctcagggcaaggcatctcccctttccgattacggacgagagggctgatgcgtggctaagctgtatgagcaaagcgatggatcaggtcgggctggagggcgatattcgtgaatttctgtacgggcgtctggaactgacggccaggcatatggtaaaccagtcagaagcggaggatcgatcatattgacgaattatcagcatgagcaatacttcgcccattgccacggacatccaaaaaaaccgctcgaaatttacatgtttgtcgaccctttatgtcctgaatgctggtcgctggagcccgccataaaaaaattaaaaatcaaatacggacgtttttttacgctgcggatcattgtttccgcgagcattacatcgctgaataagcaaaaacggaaaaaacaccttcttgccgaagcttgggaaaaaattgcgaaccgttccggtatgccctgtgacggaagcctttggcttgagcaggatcagcctctttcatcgccctaccttgccgcactcgctttaaaagcggctgaactgcagggaagaaaagcgggcattctgtttctccgcagcatgcaggaaagcctgtttgtttccaagcagaatattacagatgaagacgttcttttagaaattgccgaaaagacgaaattggatgttgaagaattcaagcgcgatctccattcgcaaagcgcggtaaaagcgcttcagtgcgatatgaaaatcgcggcggaaatggacgtcaccgtcaacccgacattgacgttctttaacagcctgcatgatgatgaagggctgaaggttcccggcaactattcttatgacgtatacgaagagatcttattcgaaatgctcggggatgaaccgaaaccttctgaaacgccgcctttggaatgtttcattgaatatttccggtttgtcgcatcgaaagaaatcgcactcgtttatgatttgagtctagaagaagttgaaaaagaaatgaaaaaactggcattcgccaaaaaggtcgccagagtggaagcaaagcacggtctgttttggaaatctctggccggcacccaggaggatgtcacctgttgtgatcattaaaaaaagctgattccttacggagccggcttttttttgtgcaaataaagaaaccgcgccgggataagcgcggtttcatatgtcttaacgacaacaaaggggatgggagaaatttttcacggtcaaacaaaggggtaatgtttgtttgtgatcaatttcacatccttatcatatcaaatcttgtcgagttttgacaagccataagattaatgttcatatttttgtcacaaaacataactgactgcttgttttcatagaatatatcaatgaaaaacaaggagggaaatcaatgctccgcaccgtattgatcatcggaatgattgtgtttttcttctttttaaacctgctggccatgatgcacatgctgccgatttacattacatctcccctgctgtttctgtccatattgtttgccttgtaccggctgaaccatagaaaaacgtttaaagggttttaggaaaagcctgcgcatcatatgcacaggcttttttgaattacgaagggttcactttcgaaagaagctcttccatttcattcagtttctcttcaaacattttgcaggccgcctcgatcggttcaggcgatgtcatatcgactcccgcttttttcagtatgtcaatcggatattccgagcttcccgcttttaagaattcggtatagcgctccaccgcaggctggccttcttttaagatctggctgctcagcgcttgggccgcactgtagcctgtcgcatattgatacacataataattgtaatagaagtgcggaattcttgaccattccagactgatttctttatcaatcaccatgttgtcaccgaaatactttttattcagatcataataaagttcgttcagcagttcaggcgttagcggctcgccttcctgtgctttcgtatgaatcagatgctcaaattcagcgaacatcgtctgtctgaacactgtgcctctgaatccttcaagcatgtggttgagcaggtacagacgctgtttttcatcctttaagctgttcagcatatattcaccgagcagcgcttcattggtcgttgaagcgacttcagcgacaaaaatgctgtagttaccgtacggatacggctgatattttctcgtatagtagctgtgcacggaatggccgaactcgtgaacgagcgtaaacagattattgacattgtcatgccagttcatcaagatgtacggattcgtgccgtatgtaccggacgaataagcaccgctgcgttttcctttattttcgtatatatcgacccagcggttttcaagtccttcttttaaaatagacgcgtattcctcgcccagcggagcaagtcctttgagcatataatctttcgcttcctcatatgtgaccttcattcccgaatcttttacgagcggtgtgtaaaggtcataaatatggacttcatcaaggccgagaacctttttccgcaggtcaatgtaacggtgtaataacggaagatgtttattgatcgttttaataaggttatcgtaaacttcttcagggatgctgttattggataaagccgcttcccgtgctgatttatactttttcacacgggcgtaaaaattatcttttttcacagtgccgctgagtgtagtcgccatcgtgtttttatactgtccgtatgttttatatacggcttcaaatgcgtttttgcggacttcacgattgctgctttccaggaaattaataaagttgccgtgtgtgatttgagtttccttgccgttttcatctttaatcgacggaaacgtaatatcggcgttatttaaaacactgaatgtattggaaggcgacgacagcgcttctgaggcttccgcaagcagggcctcttcttgttcgctcagcacgtgcggacgctgttttgtaatttcttcaattgcatgggagtaaagtttaagctcctctttttccagaataaactggtgcagcttgtcctcctgaatcgccagaatttccggttcaatgtaagcagtcgcgctggcagcctgggaatacaggcttgcggctttgtcgttcagcccttggtagaaagaatttcctgtatcctggtctgagcgcatatgcgcgtatgcataaagtttcccaaggcggttcgtcacttcatcctgtgccgtaagcgccgcgtataaattatcagccgaatgagcaagcgtgcctttaaaagaagataaattcgggattaattctttaactgcttgaaattctttattccaggcctcatcactaggaaaaatatcctctagtctccatgtatgctctgcctttacttcacttctgtcaggcaactgtgctgctttattttcctcagtcatggtgatccccctcgttttctttacttcaagccaattgaaaaaacgattgtttctccaaaaacttgtgttgtgattatcttccggcttttcactgccttttgtcaaatcatatgcggcatataagaccaagcataccaataatacagtgaaaaaacgaaaacaaacagcttgtacgcccctcacattcgccaccaccttgacgttagggtgaacgaaatgaagcattctcattccccaaaaaagagcagatcccgccggcgcagctcttctgccgtttgagggagcttccgttgagatgagggcatatatacttcattctcaatttcccttaaaaaatcctgcaagcataagaaatcagcatattgttttaccgccattccgataaggctatcttgtgaaccataccgcatccgaatctccttacgcctgattttttgccgcaaatcatgaaccatgcccgataatcggatcggtgcgccttttttagaaagttccgcaagccgtaagtataaatggccctgccacacaaaaacgggacttgcaaacacaaagcccgctgaaacaggaataaacacttcagaggggagaaatggaaatgcaacctgatgtctttcgtaaaaaagacgccggataagaccggcatcttcagataaaaaccgcccgcttttgtttcggaagccggctacggcacgtccccacgagggaagtctgacgctgtgccgcccttccggatgacaaatgtctttcaggtttgctttgtgaagagggattgtaattaagccggcataagaatagccggtgtaaaacggagtgatggaatgcagcctgtaaaaggagcgggcgtcggggcagtaaaacagtaaggaggaaaatgaatggacttcaaagaactgccagtgaaaagcagaaagccggaaaaattgcgcggccatccgttttaaccgttttgccccgatgatccagaccggccggtacccggcgtttttcaggcctgccgtccggctctttaaagagtccgccgaaaggttcgcacattgaaattcaaaagccagcctctcttctccgctttccgccgtcaagtcaggccgctgtccagcggaagtcagatacggttccaggctgacgctgcacccttgtgtctttagccagagaaaaagctgcctttttccttccagatggtattcgctttcaggttcggattcccctggacacagcctgctttttttatgagcgaagtgcggcagtttctcccgtcccagtttgatatcaagctcacttttgcaaacggggcagaaccagcgtttctttctcagctccgccgctttttcctttgaatagcttccggccagctgaatgagccgtccgtcggcagtcacagcactgaacatgttgcatcttctcctttcctgaatcttgttgtattcagcaggaagaagatataatcctgtttgcggatgagagccgttatacggttttcagccgttcatcctgtcattcagaacaaaaaaaaccgatttctgctgagagaaatcggtttgttatgatgcaaagtgtttttttattgtatataacgcatgatcagcgatcaccaatttgccgtattcttcaagacggtgaatgctgactgatgattcgtgcgcgtactccaacaggatgcttagctgattttcaacctcttcatcagtttgctcataaaaatctgcatataaataatatcggtcttcaaacgaatacagggtcgttttaattccgttaagattcaattttgatagcgagatgagatcctcaaaatcatcgaaccgcaaagtgaactgaagcttttgctccttatcttcccggctctcggcctgctcttctttctggaaatcatcaagtaaagcatcgagattttcatctgccggctcttgttttttatcttccgggatcggcagttcgagtttttgtccgtccttggaaagctgggcttttgttacgattatttccagtcctttgtccaatgcctgaacctgaatccaaagaggaccctcgacagcgaattcctcttcatcatgcacttcatccatgacttcccagaacagttcttcactgcgctcgcgattgtaccagatttcttctctgtcaaaaccgcgatcttcaatatcaccataagacatataaaattttacagtatgctcattaattctttctatttccattttgccaaccttcccttctttataagatgttgaagggacatctaagctcccgatgaatagtactttactacactttacccattccgtccacatcttaaccttatagaagacagcgcaaattctatatatttctattttatgataaaacagttataaaagaaataaaaaagcattttcacaccgaaaaacaggctttctcccggttcccatcataaatagcgcactgcttcatatattagctgtacaagcaatcgatctataagcgaggtgttaccatgccgcacgattacctgctgtcccttctgctcattatcggaattgaccttattctcggcggtgacaatgccgtcgtcatcgcgatggccagccggaatctggcccataaacaaagacagcaagcgatcatcttcggaacgtttatcgcagtcgtcttgagaatcgttctgacgagcgctgcggtctatttattgaatgttccttttttgcaatgcgcaggcggggtatttttattgtatctcggctatcagcttctgattgagaagaaagatgcgcagcatgtgaaaagcagttcttctctttggaaagccatccgcacaatcgttatggctgatatctttatgtcgcttgacaatgtcatcgcagtagccggcgcttctcacggtgagctgacacttgtagtgatcggtctcttcatctcggtgccgattatcatttggggcagcaagctcgttcatgccgccatggacaaaatgcctttattgatgtacgccggaagcggtcttctcgcatttaccggcggtgaaatgattgccggagacagcaagctgtcatttttcatggcagaacacggcattatacaaatgacgctgccgattttgaccgtcgtatttgttatcctcgccagtatgatttaccaacagactgaaaaataaaaaaagcccaaaccgcgatgggtttgggctttttccatgcttatcgtaagcttatatcagttggcaagacgctgtgcttctcttaattggaaagaacgcacttttcttggcaggaatcgtctgatttcatcttcgttatagccgacttgcagacgtttttcatcaatgataatcggacggcggagcagtcccggatgctcattgatcaaagtatataagtcttgaagcggcatagattcaacatttacgttcagtttctggaatactttagaacgggtagagataatttcatccgtaccgtcttcagtcatacgcagaatctgcttgatctcatcaattgataacggctcggagaaaatgtttctctctacaaacggaatctcgtgctcttcaagccaagctcttgcttttctgcatgacgtacagctaggtgatgtgtataatgtaaccattaatcttcactcctctaattagtaggatgaacatgttgtattctcaaattgaaataactttaaaaaaggaatctttataggtattatactataaaaaagtaagtgtgaacagtctcctgagaaaaaaatgtgtcaatccggcaaatttacggctggcggatgtttccccattctcaattagctcagctgatcgaaaatgttttttcgttttttctcatcaatgactttgagaacttcatccgttttttcgtatgattctccgtaccatttttcatctttataagtgtgaatgttttcatatgtctgtttcatcgcttcaaacatttcttcttctgattccgtcttaggtgaccagtacagaatctccattttgttcacttcattcgtagccaatgaccggcgccgatacccgattgactgcgcgtgcttgaaatgctctctttgataaaaacgcaagcgtttctgtgtatccgtgtcatcctcgtcaacaggctccacctcaagcagaatcggcttgtttttctttttcagcctgccgatcagcttacttccgaggccttgtcctctggatttctttgacacaaacaggtaatcaataaagatgaaagagtcaaattccgcatacatcagcacgtggtactgcccctcttctttatgataaacatcgctttgctcctttaacagagcttccatatgcgcttttgatttcatttcttcaatcggaaaatattcactcagcttttcgtaccagttcattcatttgctccttatgggttcgttgacttcacacttttagatataccccatttccgattgtttaaacaatcttacatctattaagacgtgtgatcctttaacatggtttcaatttttttaaaatggtgtgtaatcgacgtttttggtatagcggtttgccgcgtcccacaataaaaattcgtcaattccttcatcatgcagcgctttaacctggtcttccacctggcgttttccgtacttttgataatttccgctgccgagatatgatgccgtgaagtcctgaagccacggacgcgatacaggcgggtgtttcagcttagacagttttttatgttccaccttcgcgtattctttgacgactttgtaaggctcaagatccggtttatcaatgccgaaatagcttgtccaatggctcggataaatcatggatgaaatgacatcgacctgttctgaaattttgctgaaattctggccgatcccaggcgcttccggcagcgtggctgaatagccgaaaatatcaaccgacacatccgcgccgtacggcttgagttttttcttcgcataaccgacaaaatcggtgacggcgtgaacgcgtttttgcacattgctgtctgctgtttttccgtaatcgccgtgtccgtatgtcagttcgtcatcacgtttttcaaatccttcaggaaaacggacataatcaaactgaatttcttgaaaacccatctttacggcttgttttgcaatctttacattgtaatcccatacttctttcataaacggattgacgaacgattcgccgcggccgtttttccagacacttccgtttttttctttaaaggaccactccggctttttgttcgcgagttcgctgtctttaaatacgacaatacgcgcgatcggatagatctttttttcctccagctttttcatcatcttttttgggtctttgatgtacggcttggcgattttggcatactcagaatggccgtccggcttaaaggtgagatttccgttgtcatccttgacatcaatcaccattgtattgagctccgttttgtccacaaagtctgtcagctccccgaatttgcttcctcccgctgaatgccctgtgacgtaaatgccccgcaccttatcaggatgtgaaaaatgcagccctgacggataagcgaaccgtgcatttgatttcggcagttctttttcggccagcgctatttttacaagcggctgctcatctttcgcagcggcgtgggccggataagcacctgcactgataaacagtcccgcacaaatggcgcacaaaatggttttcatactgatctccccctttttttccattatagaaaaacgggagcaagcttaataaacttgaatgtgcgcaaaaaaatcctccaagactgagtcttggaggatgatacatttataggtaggttttaaattcatcttcagtgcacataacaaagtgtcccggtttcacttctctgaattccatcttttctccgtcttgcagctgatgaatggacggatcgtatttctttcgcgtgcgatttctttcatagtccggatcagggagcgggatagcggacagcaatgatttcgtgtatgggtgaagcgggttttcgtaaagctcatccgccggcgcaagctccaccaattttccgaaatacatgacgccgatgcggtcgctgatgtatttgaccattgataaatcatgggcgataaacaggtaagtgagccctttttctttctgcaattctttcattaaattgacgacttgcgcctgaatggagacatcaagcgccgaaatcggttcgtccgcgatgataaactccggatcaaccgccagcgctctggcgattccgatacgctggcgctgtccgcccgaaaattcatgcgggtagcggttggcgtgctctttatttaaaccgaccgtttccagcagttcgtgaacccgctgcatccgctcttttttcgtttttgccaggcggtgaatatctattccctcggcaataatgtcggcgactgtcattctcggatttaaagatgcgtacggatcctggaaaatcatctgcattttccggttaaactccagcagtttcttgcgggattttttcccgtgcacattttccccattaaagagaacttccccgccggttgcctcatacagccggataatactgcggcccgtcgttgatttaccgcatcccgattctccgacaaggccgagcgtttcgcctttataaatatcaaatgacaaatcatctacggcttttaccgttcctttttgcgtgaaaaaatgctgttttaagtgtttgatttcgagaagcttctcagtcatttttttcaccttccttcattaaaacaggatgctgatacgtattcggaagctgacggagtttagccttcaccgcttcaggcggctcgaccttaggcgcatcaggatgcagaagccacgatttcacaaaatgcgtatcagacactttatacatcggcggttcctgttcaaagtcaattttcatcgcatatgagctgcggagcgcaaatgcatcccctttcggagggttcgtcagatcaggcggcgtgcccgggatagccgtcagtttttcctgatcggtgctgtccaggctaggcattgaggcaagcagcccccacgtatacggatggcgcggatcataaaagatttcatccaccgtgcccgattcgacgacctgacccgcgtacatgacagcgacccggtcggcgacattggcgacaacgccgagatcatgcgtgataaaaatgatagacgtatcaattttcttttgcagatctttcatcagctcaaggatttgtgcctgaatcgtcacatcaagcgctgttgtcggttcatcggcaattaacagtttcggatttgccgcaagcgccatcgcgatgacgacacgctgtctcatcccgcctgaaaattcatgggggaattggccgatccgtttttcgggcatcggaatcccgacgagatcaagcagctctatggcgcgctttttcgcggcttcacttgagattttttcatgtttgaaaagcacttccgtaatttgtttgccgactctcatcgtcgggttcagagaggtcatcggatcttggaaaatcattccgatgtcctttcctctgatggcctgcatttctttttcagacatcggcacgatatcgcgtccgtcaaaaagaatctgtcctcttttaaagtagcccggcggcatcgggatcagcttcataatcgcttgggaggtcacactttttccggaacctgactcccccacgatcgcaagcgtctctcctttattcaaatggaaattcacgccgcggattgcctgtacctctccgccgtatgttttaaatgaaatggctaagtcttttacttctagcaaacgtgtcactcatatcactccttatttgcgtaacttaggatccagcgcgtctcttaacccgtcgccgacaacgttaaagccgaacatcgccaggcagataaagccggcagggaagaacagacgccaagggtaataggttaatgcaggcaatccgtctgaggccatcgttccccagctcgcaagcggcgcaggtacgccgaggcccaaataacttaaaaacgcttctgtaaaaatcgccgtcggaaccgtcagtgtcattgttacgaggatagagcccatcgcgttcggaacgatatgcttaaacaaaagccggccggttttggcgccgagtgtctgtgaagcaagcacatactcctgattctttaattgcagcacctgtccgcggacgatcctcgccatattgatccagcccgtgattgtcatggcgacgataatggtcagcaatcctttcggcaggacaaccatcagcaaaataaccattaataatgaaggaacagcccacagaatgtcggcgatgcgcatcatcacttcatctgtgcgtccgccgcggaatccggaaatgctgccccagattacgccgattaataaatcaagcacggcagctgcgacaccgataaagatagaaatccgcgcgcccacccatgtccggacgaatatatcccttccaaggtcatccgtgccgaaccaatgatctttcgagggcgctttatccgcatttaatagattggtagtggcataatcataccttgaaaagacaggcgcaaaaatcgccatcagaataataagaacgatcagaacgaacccgaccatcgcaagcttattgctgcggaagcggagcatggcgtctttccagagggaaaggctttttttatttattttttcggcatcgccggcattagctgaagctggttcaaacatatttttaggaatgttctgcatggtctaggctcctttctttgctttggaaagcttgattctcggatcgattaatccgtacagcacgtctacaattaatacgcataaaagcaggagcacgctgaagaacacggtaactcccataatgaccgtataatcacggtttgtaatgctgtttacaaaatgcgcgcctaaaccgggaattccgaaaatggattcaatgatgaaacttcccgttaaaatggatgccgccatcggccccatatatgtcacgaccggcaaaagcgcgtttcgcagcgcatggcgcacggtgactgacggacgggaaagtcctttagcttttgcagtccgtatgtaatcgctgtttaacacttcaatcatgcttgaacgggagagtctggcaatgaacgccatcggcatggaagcgagcgcaatagagggcagaaaggtgtatgcccaggattcccaccctgcgaccgggaacagttctaatttaattgagaaaatatattgcaaaatcgtcgccaatataaagctcggaactgagatcccaaagatcgttaaaatcgcaatggtataatcctgccatttattatggtacagggcggcaagcaccccgaaaagcacaccgaacgctaaagcgaggagaatagcttctgcaccgagagtgaatgaaacggggaagcctgaattgattaaatcattaacactttggcctttatatttaaaagaaggtccgaagtcccacatcgccacagattttaagtagctggcatattgaacgaaaagaggcttgtccaggccatagtgttcgtttaagtttgcctcaatttcaggcggcagctttctttcgccggaaaatggtccgcccggcgctgcctgcattaggaagaatgtggcggtcacaatcacaaacaatgtgatgatcatgtaaatgaatcgtttaccgatatatttcagcaaggtgaacacctccatgttttttacaattttatacttaatcagtaagaaaggtatatggggacatcctccccatataccttgggtcttttgttttcagaaccgtcttttattcaaaagaagcatttctgaagtaaacttcgcctgttcctgtcaagatcacatttttgaggtttttatcctgcacccaaggatccgtatagaaataaactggcgcgaccggcattgcgtcaataaagatcttttctgcttttttcagctcttcgatacgtttatccggatccgtttcaagctgagattggttcagcagctttttaaactcaggatcttcccatccggtatcattgtttccgccttctttatcacggaacaattctaggaagttgatcggatcgttgaaatcgccgagccagcccatacgcccgatttggtagttctggctgtgcagcttgtcgatgtaaacattccattcggagttatcaagctcaactttgacgcccaagttctttttccacatttcctgtacggcctgcgcaattttcgcatgcgcgtcatccgtattgtaggacagtttgatcgccggaaggtcagaggcattcttgacgcctaattccttcagtcctttatttaagaattctttagctgatttgacgtcattgtctttgaaataaccttttgtgttatccttgaatcccttcattgacggcggcaccgcagccatggccgggatctgttcgccctgcgttacatttttcacgatggacgagcggtcgatcgcataagcaagggctttacggatgttgacattgttcagcggtttcgcttctgtgttgaatttgtaccaatacacgcctgcgatcggttcaacgtgaagagatccgtcttttttcaatgtcggcagagattcagtcggaagctggccgagcggcattcctgcccagtcaagctcaccggcctggaattttttcagttcggtgttgttattgttaatcatcaccatgttgattttcttcaatttcacagcgtctttatcccaatattgatcgttcttttcgagcgtgatggaaccgctgtgtttccaggccgtcattttgaacgggccgtttgacacataattttcgcccgcgtttgtgttccagtttttatgtttttccgcgattttcttgttgatcggcatatacgtatagaatgaagttaattgcgtgaaataaggtgtcgggttattcagttcaacctttaatgttttgtcatttacggcttttacgcctacatcatcaatcttgccttttcctgtattggcagcttcagcgcctttgatgtagtagagctgataagcgtattgtgattcgttgttcgggtcaagcgcccatttccacgcatattcaaaatcctgcgccgtcacagggtcgccgttagaccatttcgcaccgtcacgaatcgtaaatgtataggtctttccgtctttgcttgtttcaattttagatgccattccttcttcaggctcacctttggagtttacgcgtgtcaatccttcaaaagtctggcggattacgcctcctgaaacggaatcattcgctaaaccaggatgcagtgagaacggctcggttttaatattgatattaagtgaagtctgtccttttgtgtcttttttaccgccgcctgatccgccgctgaatccgccgcacgcacttaatacaagcgagaagataagcatcaaacctataatagaccaacgctttttcatgcactaaccccctaatcaaatttttcagcctttactactaaatactcagaaatatcagacaaaataacttaatatttttctaaactttaattgtgttccgtcttttctgattattttatgtaaagaagctgtaacaatagagtgaacaagttcattataatgaaatgaataatttattgcaatactattttctcaatttaaaatatttaaatttggtcagtttttctgtcaaaaaggtgatacacttctatagtttaaagcatgacctaactaaatttttttattgcaatttccagttcatattgctttttacatataatattcgttatacgaaatgttgatatacgttatcatttaagcattttcagttctttttgaggatttccagcccttaagcaaactggaaataagcttgtattcctctgatgacatttggctataattgatttataatagatcaatcaaatacatttgttgtgattgcgatgatgaagagtagtacacattttcatccgtttgaagagagtctgcggtgctgggagcaggtaacgggcgatgtggaatggacttctgagcagctgaccgaacgttagtaggcccagccggagcagcctccgttaccaacgtctcgagcgattccattgtaatggaataatcagggtggcaccacggttcattcgtcccttttttctacgggaagaatgggctttttttattatgttttaagaaatgaggtaagaaatatgaagaaaacgattttttcaggcattcagccgagcggttccgttaccctcggcaactacatcggcgcaatgaaacaatttgtcgatttgcagcatgactacaacggctacttctgtattgtcgatcagcatgcgattacggtaccgcaggatcggcttgagctgcggaagaacatccgcaatctcgcggctctttacctggccgtcggacttgatcccgagaaagcgaccctctttatccagtcggaggttcccgctcatgcccaggcggggtggatgctccaatgcgtcgcatatatcggcgagcttgagcggatgacgcaatttaaagataagtcaaagggcaaagaagccgtcgtgtcaggactgttaacctatccgccgctgatggccggcgatattttactgtacggaacggatcttgttccggtcggagaagatcaaaaacagcatcttgaactgacccgcaacctggcggaacgcttcaataaaaaatacaatgacatcttcacgattcctgaggtgaaaattcctgaatcaggcgcgcgcatcatgtcactggctgatccgctcaaaaaaatgagcaaatcagatccgaaccaaaaggcatacatcacgctgcttgatgagccgaagcagctcgaaaagaaaatcaagagcgccgtgactgattctgaaggcattgtaaagtatgataaagaaaacaaaccgggcgtttctaatcttttgacgatctattctattttaggaaacacatcaattgaagaattagaagctaaatatgaaggcaaagggtacggtgaattcaaaagcgatttagccgaagtcgttatcggcgcattgacaccgatccaagagcgctaccgtgaattaattgagagcgacgagcttgaccgcattctcgacgaaggggcggcgcgcgcaaacaaaacggccggcaaaatggtgaagaaaatggaaaacgccatgggtctcggacggaaaagaagataaagaaaagaggcgggagaatccccgcctcttttttagttcacttttgattcctgctccatttcccaaagcttttcgaaaaacggctgccctttaatcaaattttcacagaacgcaagatgtttatctgaccagccttcaattgtttcattgtaaagcatgtcccagatctcttcaaagctcatccgtttgatctgctcatacatatgcggattccattccgtgtaccaatacacaatttccgcacggtttttcagccctttcagctggtcgagcgccataaacatcagctgcttgatctgccgctcttttctcgtcagccctctgacgtgctccggcgccaatgacaaaatgtgatattcctttgaagactccaattgcgccggctcaaattgaaacgattccggttctacatcctttaccatttcataaacaagctgctcctgtctcggaatcaggcggctctttctgaccggaatggtatacccgatcgtatccacggcaatgatgccgatcccgtctgtcacgacaaaacaatactccagctttgtccgctcatgattttttcgcacgtatgacttttggtggacttggtcaagcagttctttcggaagctctgataagtcgttttctatgtaatgaaataataccgacggcactctgagcagcggcgtctgatccaaaagctcaaccgtgtcttccttccgccattcatgaaaatggcatacattgtagccgttttcttccccttcaaaccaattgacccatacatcatgaagaaataacatattcgacccctcactttataaaaactgttgtccacagtataggcaagggatagataaattattccatttcaatatgagatttccgcaatacggaactggatttccgactgcatcgcaacaaaaaaatctcccgttccgtccgggagatcatttcacatttttcggatcaagcgcatcacgcagcccgtctccgacaaagttaaagcacaatacggtaagaaggatcaacaaacctgggaataacgggtaccaccaagcctgaatcataagcgtaaagttctgtgcatcctgaagcatattgccccagcttgcgatcggcggctggatcccgaaaccgagataacttaatgtagattccgccaaaataaccgttcccacctttaatgtggctgagacaataatcggtccgagcgcattcggcaatatatgagaaaagatgatgtgatgattttttgtaccgatcgtctttgcagctaatacaaactctctggaacgaagcgataaaaactcccctcggacaaggcgtgccgttgttgtccagcctgtaagggagaaaattaaaattaatttatccattccgggctggaaaatcgtaacaagtgtaataagcaaaaatatatcaggtatggataatacgatatcaacggttctcatgagaacggcatcgacaatccctttaaaatatccggcaacggctccgacaactgtcccgattgtaatcgcgccgatcacagaagcgaatccgacaagcaaggagacgcgcgccccgtacagaaccctcgtaaagatgtctcttccgaatttatcagttcccattagatgttttaagctcggcggcttcaaacgattgataagagattgactctccggagagtaaggagcgattaccgaagcgaataaggctgacaagatgatgatggttaatataacggctccgattacagctagtttattttgaaagaacttttcgaaaaaaatcttcgtcattgtttccggtttggattgaatattttcctttaattttacttcgctggggggtgtgccggtatttggctgtaacatttgacctctcacctctctttgttaatattcaatgcggggatcaaccagcgcatataagatgtccgcaattaaattccccaccacaaccaaaacagctgaaatgaccgtcatggccatgataaccggataatcccgcgaaaaggctgaatcaataaacaatttgccgagacccggccaagtaaaaatctgttctaccactaccgctcccccgataaatgacggtatcatcagaccaaaaatagtgatgacaggaagaagtccgtttctcaaaccgtgtttaaaaatcactttattatctcggaatcctttcgcacgcgccgttcgtatataatcctgttttaacacatcaagcatactggatcttgtgtatctcgttatccctgccatgtctgccgtggcgagcacaaaagcaggcagaatcaagtgatgcaatcggtcaaatatgttaaagtcagcattcaaagtgcttactccgccagtgggaaaccaccccagatttacagataaaaccatgattaaaatcaaaccgaaccaaaaattcggaatggcaagccctaaaaatgaagtaacagttatcccgtaatccaattttgaataaggacgcttcgctgacagaacaccaaatggaatagaaataagaagagcgacaagggttgagaaaagcataagcacaatcgtattcggtaagcgggataagataagttcagaaaccggagtgcctttcttgacgatagaagtcccgaaatccccttgcagcatattccccagccatttcacatattgaacaggttccggatcattcagcccgtatttttcaatgaatttcgccctgtccgcttgactgattgtagggtccatcataagtgacatcgggtctcccggcgctgctttcatgatggcaaacgacaaaattgtaatgcctaagagaatcggcaaggacattaatgttcgccgtaaaatatatgtaaccatgttcttgtcccctttttaaataggataagagaggaaaggaacctccttccctctccagggcttttgctatttttgatccagccaccatttttcaatattgtacaagtcatttttagggtggaatacatagccttgtaaattattcggcatcgctctgtggtaattgtaatagaataagaagctgtacggctgatcttcagcaatcaatttgtatatctcttcatacttcttttggtattcttttctgtctgtaattgtcttcgcttcttcaagcagcttgtcgactttcgggtttttataccagatattattcagcccgtttttcgattggcttgaatggaagatagagaactgatccgggaacgttgcaagactccatccgagaagaagagcgtcataatcccatttaggggcacttgtctgttcgattaacgcactgaattcaacaattcgcggtttagcctcgattcccacttcttttaattgctgctgaacgacaacagctaaatcttcacgaattttattgccttgattcgttttaatttcaaatgagaatttttttccgtctttatcaaggtagccgtcaccgtcatggtcttcccatccggcttcttttagcagctgctttgcttttttcggattataatcaaatgtcggcactttagacttcggataattccatgacagcggactctcaggaacatccgctaccttaccgtctccgttcagcacttgatccaccattgcctgcctgtcaagagcgtaagtcaatgcctgacgcacttttttgtccttaaagatctcttttttctcattccagccgatatagctgtagtttaagccaaggtcagatttgaccttcacatttccaaacgttttaactgtatcaaaatctgtgcccggcacaacgaagaaatcaatatcccccgcttttaactgagccacggcagcgttagaatcaggaatcgttttgactgtcactgtatcaaggtaaggtctgccgccaaagtaatcatcatttgcttccagtttgacatactcgccctttttccactcaacaaacttaaacggaccggagccgattggatttttacggttaaattcattctctcccagatcagcaaccgggaccttacccaatatatgtttaggcaaaatgccgtaactgtcgagaacgacattatagaaataggcatcttttttcttcattttaaactgaatttcatattttccttttttcgttacggatttaagggactcaaaacccgagccacgctcaccgttgtaatccttgttaagagggatgctgtaggtgaaaacaacatcatcggccgtcagctcttttccatcatggaatttaacgccttttttcagttttacatcatacgttaatcccccgtcagcttctgttactttttcagccagcgacggcttgacgtttaatttctcatcagtttccagtaatgtgctgtaaagcattccttcaatatcagaacttgcaacatcggtagaataaagtggattaaaaagtgtgggttccccggttgacccgacaaccaaatctccgcctttttgcggttttcctgccggtttggattcggtgcttgtggattttgagccggagcaggctgacaggaagatggcgagcgccataaaaacacttagcatcatcagtgcgcttttacgtaatttcatatcaattccccctttgtgatatatatgcagcaaactggttatgtaatccggcataccccctctcgatgcttgtcatttcaggcatataaatggcaggcgacgtaatggccgggagcggcttcttcaaatgccgggatttgttccttgcagatcggtttggccatcgggcaccgcgtgtggaacacgcagcctttcggcgggtttgccgggcttggcagttctcctttcaggatgattcgttcccgcttgacggcgtctttttttctcgtgacgggcactgaagacaaaagcgcttgcgtataagggtgaagcggattgccgtacagctcgtgtttatcggtcagctccatcatttttcccagatacatgacgccaactctgtcgctgatatggcggacaacactcaaatcatgagaaataaacaaataggtcaggttgaattcttcctgcagttcttccatcagattgatgacctgggcctgaatggagacatcgagtgcggaaacgggttcatccgcaataatcagctcgggattcaacgtcagagcccgcgcaatcccgatccgctggcgctgtcctccggaaaattcgtgcggatagcggtttgcaaagctcggatgaaggccgactttcgccagcagctcctccactcgctcgttccgctcgctcatgctgtacatatggtgagtctggaacggttctttaataatggaacgcagcgttttcctcgggttaagggatgcgaagggatcttggaagaccatctggatgtttttgcggacgctttttctcagcttttcttcagataatccggagatatcctgacccttaaaaagaatacggccgtctgtcggcttgtataaacggatcatcgtccttcccgccgttgatttgccgcatcctgattcaccgacgatgccgagcgtctccccgcgcttcagtgaaaaagaaacgccgtcaacagcctttatatcaccgactttcctttgaaaaaaaccggagcggatcgggaaatatttttttacgtctttcagctctaaaatcgtttcttggcctgcagctgtcattttgattgggcaccctcttcctcatataaaaaacatcttacagaacggccgctttcatgcgttatcagctccggctgccctgttttgcatttgtccatcgcttttgaacacctcggggcgaatcggcagccttccggaagattatccggtgtcggaacactgcctttgatcgcttttaatgtatcaatctctccatctatcaccggtatggagtttaacagcccttcggtatacggatgaagagggtttaaaaataagtcctccacactcgcgctctctacgacttgtccgcagtacatcacgatcaccctgtcggcggcttcggaaaccacacctaaatcgtgagtgatcagcagaatggaagtatcgaattttttgcagaggtctttcatcagctccaatacttgggcttgtatcgtcacatcaagcgccgtcgtcggctcatcagcgatcagaagcttcggattgcagctgagcgcgatggcgatcatcaccctctgtctcatccctccggaaagacggtgcggatattctttcatcacttgttccgctctggagaatccgacgagttccagaagctcaacggcttttttagccgcttctcttctattcatttttttatggtattcaagcacttcggtaatttgttcgccgatggtcagcaccggattcagggaagtcatgggctcctgaaagatcatagagacgtcatttccgcggattttgcaatattcgttttcggtgaaggaggccaggtccctgccttcaagcttaatcgagccgtccataatttttccgcccgagctttggacaagtcccataatagaaagcgaggtgatgcttttgcccgagccggattctcctacaagagcgacggtttcgcctttgttaatgtgaaaatcaaccccgtcgactgcggggatcggctgtttctttctgaaaaaataggtctttaaattattcacttctaatagtgtgctcatgatacgcccctttctcattccgctgaagcagagggaaacatacgtttcgctatcacaaaatatagaatagtcgaaaaattttatagttgtatattattacatcattattacaaaagcaagaattttttaggataaatgtaatatccttaaataatttccattcttttaatctattaaagcgttgcctccagaaaggtttttgaagggatggccaatgcttcttttactgttttttgatggtcggttaaatatttttttactatattgaatccgacggcatagccgagcattgaggggaagtatccttttccgtataacagctgggaaaacattctgctgtctctcgttaagcggaggttcggcttgactcttttttcaaacagaaaatcaagctgctcaggcgtatagtaggacgtccattcagccgtaagacttgagccgaaccgctcatatacagcatattctgccagcccctccatcatgattgtatcaagaaatgtctcgtctttttcgtcctttgtcacatgttctaaccggcagacgtgattatattcatgtgtcataagggcggatacagctgaattggaactatccgacgatagaaagaggaacattttgtcccgaaaggccagaccggattttgatccgaattcctgacggattttccggtttcgttcgtcgacgggcaaaacgacgatcggcacgtccggcccgttccacttctcctttaaataagcttcctccttttgaatatggctgtagcatcctttttctttcagccgtttactggtcctaacgccgtccttcaaatggcggaacatgccgtggttttgcagcatcccgagtatcggcttccactctttcttatcggcccctgaaaaaagcggcaaaagatgcggagccagatcatttacggatgccgccttttccatccattgatatgtctgcttgacgctcatacggttcgcctcctcttgttgttatcatatgcacacaaaaaaaaccggccacctttttcaggcagccggtcaaaaactgtattattgatattttttaaagatcaaagtggcattatgtccgccgaagccgagcgagttgctgagaacgatgttgacatcctgctcgcgcgctttgtccggtacataatctaaatcacactcttcatcaggtgtttcgatgttaatcgtcggcgggataatgccgtctttaatggccatgacggagaagattgcttcaattcctccggcagcgcctaacaaatgacccgtcattgattttgtcgaactgacggcaagcttgtacgcatgatcaccgaaaacggtcttaatggcttttgtctcgtatttatcattgtagtacgtgcttgtgccgtgagcgttgatgtaatcaatttcttcaggcttgatgcccgcatctttgattgcttcctgcatcgctcttgcaccgccttccccgtcttgggcaggcgcggtaatgtggtaggcgtcacccgttgagccgtagccgacaatttccccgtagattttcgcaccgcgggcaagggcatgctcaagctcttcaagcacgatgatccccgcgccttctcccatgacaaagccgtcacggtttttatcaaacgggcggcttgccgttttcggatcaggatttgtagaaagggctttgtttgcgctgaagcccgcaaatgacattcttgtcagcggcgcttccgttccgcccgtaatcatcgcatcggcatcgccgcgctgaatgactttaaacgcgtcaccgatagagttcgttcccgtcgcacatgccgtcaccgtacaggagttgactccttttgctccgagagcgattgagatttggcctgtcgccatatccggaatcatcatcggaacaaagaacgggctgacccttctcggccctttagtcaggaagatttcgaattgggattcaagcgtttcaagaccgccgattccggacccgacccaaacgccgactctcggcgcgatctcgtctgtgatattcagaccggcatcttgaacggccattttcgcggctacgacagcatattgcgtgaagcggtccatttttcgcgcttcttttttatccatgtgattttcaatattgaaatctttcagttcagcagctactttcgccggatactcgtccgattccacacgtgtgatcggtccgattccggatacgccgccgattgcatttttccagcttgtttcggcgtcgtttccaagcggagacagggctccaagccctgtaacgactactctttttttactcatcttgtgtacacctcacctttttttatcgtccccagcgtattgctatggcgccccatgtcaatcctccgccgaaaccgaccatgacgatgacgtcgccgtctttaattttgcctgcttccagttcctctactaatgaaatcggaatggatgctgcggatgtgtttccatatttatggactgttttagacatcttttcaaccggaagctccaaacgttcccgtgccgcttccatgatgcggatgtttgcctgatgcggaatcaaaaagtctacgtcctctttggagaggccggctttttcaatgacatttacactcgattcacccatttgccggacggcgaatttgaatacttctcttccatgcatgattgtatgccctttttcatctaagtacaagtgctgaccgcctgtaccgtctgctccgagctcaaatgacagtatgcctctgtcgtcgctgaccggtccgatgaccgccgctccggctccgtctccgaacagcacagccgtattgcggtcgtcccagtcggtaatgcttgagagcttttccacgccgaccacgaggacatgtttgtatgtttgcgattcaatgaattgtttggcggttacgataccgtacataaaacccgcacatgcggcgctgatatccatcgcgcacgcttttttggccccgagcttctcttgtatcatacaggaaacggtagggaaggactggtcaggagtaaccgtcgccacgaggatcatatcaagctcctcagcggaaatgccggcctgatcaagcgctttttgcgcagcctcagcggccatgccggatgaatacatatcttccgcggcgattcttctttcttctatacctgttctcgtacgaatccactcgtccgatgtatctaccatttgttcaagatcatgatttgtcagcactttttccgggatgtaacggccgacgccaagaattccagctttcattggaaaagactccttttttataatgaatttaaaactaattagttatgatcaattattagtatcaggtactaattctaccctattttttttctgttggcaatatattcgtctaaactatcggacgctgctcctcatagaataaaaggaagacgaaaggaggcttcactatggatattttctccaaaatgatgttcggcgattccagagaccgggataaagaaccggaagaaaacccggagcagcctcaggctgaaaacgaagaagagatcgattacaaccacgtgatgaatcagctggggtccatcatgaactctctggatcaattaaagcccgtatttaaagacttcgcgccgatggtgtccgctataaagaaaaaaatcatgtgaaaagccacttcatgaaaagtggctctctttatttattcagctccccggcatcagatctgccaagctcatacgcttccgccatgaccgatgtaaacaggtccataaacggctgaatcatttccatagacagatctatgccggatttctcaagctccgcctttgcttccggcaggtatttcatcgcgatctgcataaattcaagagacttttcatgctgcatgtgtatccacctctattcatttgacggcagttcatttgttcggttatacgttttgacaaggtctgagattttgtcttgaaatgctttgtccaccagagggctgaacgtccccatttcaacgactccttccctgaaatcaaagttgtgatctccgctcttgagcgaacctttattatattgctcggcaattaatgtataggctttatctacgttttgcaccgtgcttgtcagcaccgtgtttttgccgagattcgattgttcggcgacatagccgatggcgtaaagcccgtcttttttgatttgctgaatgacaggaacattatacccgtctccggccggatatacaacatccgtgccttccgcttttaacttctcgtaaagatgcagcgcttcattgccgttatcccagtggtccgtaaattcagtattgacggtgatatcaggcttttcatatttcgcccctttgataaagccgtctacttcaggctgccacaaaaaggaggcgatgacgccgacctcattggtttttgacatatgggcggctgtcattcccccgaaaaaacccattgcttctcccataagatgaacgcttgtgacattatcgcttttcgccgttccgtttgcgacgacgaattccatgtcgggataatccttgctgatcatattgaagatttcctcgtattcatttccgtgcccgtataaaagattgactccttttttatgaaaatcatctatcgcttttaaaatatcttcatcggatctgatattttctttataataaacgtcaacgttaaattcagattgtatcgctaataaacctttgtaaccttttgtgccccataccaagtcactgatggtatcgggaaaaagcattccgaccttctcaatttttcctttaaacggagtttgtgcgcatccgctcaataaaaggaggacagaaaagatcatgacaagcctggtgatcaagccatgttcaaccccttttcaaactcataacatatataattgatatacgtttattgtagcggtaatgcacataacatggaaggtatttcttaaaaaatgtcgaatattgatgaaaattgtcttttccattctttaattttttcttccgcttccgttttttgcgttttttcttttatttccagggtaataatctgattttcgtcttctgtgccgtcagcctcaagctgattcatcagcccgcagaccgcgtcttctaaaaagatcctgctttcgccatcttctttttcttccgtccacggaccgtaaaggggaggaaggataatcgctttggctgtatcccgctgagcgtttttctcccagtctccgtgatcctcactgtaaacaatccaatataagggctcagccctttcttcaggcagacacccgctcccgtattgaacgcagatacgatcgtattccttttcaccgatttcatctattatttgaaaaagcccgtttctcgcgagccacattaatcgttcttctaaatacagctgcctcgttttgtcctccggttctgccaaaatgacatcaacgtgcacaccctcatccatcaaccgttcgcacaatgaaaggccgagaaattcatctgctccaatgatcagcgctgttttcatcacatctgccgcctttccggtttttcattcacacacaagccaaacagccctctgaaaagagatggctgttgtattctattcattacaggtctttttcatgactgcggaaaaaccggcagatggctctgtaaatacgcgcagggttctcaagcaggtgatacgtgatatcagtcttgcttccggtcttttcccgggcttctttatacgcgttcgcatgcagggtgtacgggtacggcgctccggtcgttctttgccatatatgtaccggcgcccgggtgcggcagccggtaatggtctgatagctcagtgagcttgcctctttttcagaaacaccgaagctctgtgccgtttccctcagaaactgcttataaaagaacttattttctttctctgattcaaaatgggcttgaaggtcaagacaaggatctaacattgcggctgaacggatatgctccgctgaagactgcagcaattgatcggcgataagggcgcccatgccttctgcgagcaagtgtattttcggattgagggtttcttgtttcagcacataatgcatcagctgtctggcgtaaaggacggctttttccgaaccccaatgccgcccgtataaattgctgttaataatggtgtaccctctgtcaagcagcacatgtaacagctggtttctcccttcatgttcgagccaaaagcttgagtcccggctgacaaagtgggttctgtcccccagaataaagatacagaagccattcggccgatacggcagatggatgacgttcagctcagatccgaattggaaaaatctttccgtaatccccatgcctgcccgcctccttttactcctaatctctctattggctatcatatgtaagaagaatgaaaacggatcggataaactcctatttgctgctatgttttggctattatcccaagcacaggaaccgaattttccatcagacggccggacaggcgggcacatgtcagtttcaggcgcgctttttgatgagaaaatgaccttccgcccgcgctttatgtatggtatgatacaacgtagaataaaatgaaggacgaggtggaaacgtgcggtttattatcggttttatttggacgttccttttaacacatatggcctgttatctggtcgcctccatgaacagcgcggcgtacaatttcaagcaatcatccgttattgccgtggttattgcggtgctagtctttgttcttgcggagatcatgcctgtcaaacaggatgcaaaccagcattaaataaaaaaacctgctattcagcaggtttttttgtgttcacggttttcgttgatacgtccacaatctgttgtggtttgaagtttcagggaacatttctccaaccgtaagcttgattttttgcggatttttgaccatgcttcccgtttcgccgatttcaacgtacacaccgttattcggcgctttttgtcccgggcggaattgatgctgctgtcccacgtcatttcctcctttttcttttttatgtagtatgcgcttgtatgcggagaaatattaaaaaccgctgaatgagattcagcggtttttttgttcatcctgtttgtaaagaagagctttcaggagcgctttttgcgcgtgaagccggttttccgcctgctgaaataccgcagagttcggaccgtcgataatctcggacgtgacctcttcttcccgatgcgcgggcaggcaatgcaaaaatgtatagtcgggtttggcgagactgacgagtgaggcgttgacttgatacggggcaaacacatgcagccgctgctgcgtctcttcctcctgccccatgctcgtgaagacgtcggagtaaatcacgtctgcatcccgcaccgcttcctgcggattttcggtaagggtgattttcgctccggaaacagccgccgcttcttttgcggcatttaccgcctcttcctctacttcatagcctttcggcgaagcaatcgcaatgtcacagcccatttttgcgcagccgatcattagtgaatgcgccacattatttccgtcaccgatataggcggcttttactccttttaattttccttttatttcttgtatcgttaacagatccgcgagtgcctgacacgggtgataccggtcggtcagcccgtttatgacgggaatatcagcatgctcggcaagctcttcgactttttcatgctcaaaggtgcggatcataatggcatcaacgaagccggacagcaccttcgccgtatccgcgactgtctccccccgcccaagctgcaggtcgctgcttgaaagaaatagtcccgttcccccgagctgggccattcccgcttcaaaagacacacgtgtgcgggttgaagatttttcaaaaatcatcgccaatgttttcccttggaaaatcggctgtatcggatgttgttttaataatgaagcttctgtcagaagcgcattgatgtctgacgggctgacatcttttaaggaaagaaaatctttgccgtacaaatgggttaatgtgtgttccgcttttattgtgtgcatgatgccacttccttttgataaagatctttgagcgatacaggctgaggttcgccggagccgcttgctaaaaatgcctttacggtttccggttcagtaaagaccgtcacaccgtgcgtcatggcttcaatccgttgtttacgcgcttcttcagagtgattgaaattgatgtggaccgctttatcctttcgctctgcccatgccgggaacgcatctttgcataccgtaaatcccgcctcttgagcctgacgttccaattccgcatcacagccttccagatagatgctgccttttttctcccagacgtgcgcgtagatttttttcagggcgctttctgcgtcaaacgcgacacacatgccttctccggtcgacttcatttccggcccgggctttacatccacatcctgaatggcgtgcgaagaaaaaaccgggaatttcactgccgttccgtgctgattttgaacctcgggcttgatgtctttaagggaagcgccggccagcaatctggcggcaagcgggatcatcggcacccccatcaccttagacacgacaggaaccgtgcggcttgcccgcggattcacttcaagaacgagaatatcccctttgtcatcaatgacaaactgaatgttcatgatgcctttaaaagccagttttaccgcgattttttcggcggcctcttttatattccgctgcatatcaggtgtgacagacggacccggaagaatcgcaaaactgtcgcccgaatggacgccggcgcgttcaatgtgctctgtgtaagtcggcacgaatacttcatgtccgtcggaaatcagatcgatctccaattcttttcctgtaatgtactgatcgatcaaaatcggatacggcatgcccgcctcatttgccagcagctctgacatttgcgcttctgaatcaacgatgatcatgcccatcccaccgatgacataagacggacggatcagcacagggtagccgattcggcttgctttttccgttgcttcttcttttgaataagcggtttcgcctttggcatgtttcaggtcaaggtcatcaagcagctgataaaacagatcccgatcctccagcgcatcaagggtttcaaaggatgttccgagcagcggaatgcccgctttttccagcggttcagcggcattgatcgcggtctgccctccaaactggacgatggcaaaatcaatgttttcatgttccgccacgttcaaaatatgttctgtcgtcagcggttcaaaataaagccggtcagcgatttcataatccgtgcttactgtttccggattgttattgatcataatcgtttcataccccagcttttgcagggtcagaacgccgtggacggcactgtaatcaaattccactccctgaccgatgcggatcgggcctgagccgatgatgagggcgcgttttttctctttccggctgatatctccgtcgctttccccgaggtaggtggagtagaaataattcgtcttggcatcaaattcagcggcgcatgtatctacgattttaaacgacgggacgatgcctgatttctttctgagagcacggatgtcttcttccgtttttcccgtgagagatgcgatcatgacatccgtgaagccttttaccttcgcctgctttaaaagcagcattgacagatgatccccttcttccatcagcttgttttccaatgtgatgatatttcggaatacatggagaaaaaacgggtcaattttcgttttggcatggatgtcttctatcgtttcaccgcggcttaacagctccatgacgacgaaaaatctccggtcatccggcgttaccgctaattcccacagctgattgatcgtacagccgccgagttcaggcaggcgggtgccgatcgttttcagctcaagggaggccgccgctttttgaatggccgcttccatatttctttcaatcgccatgacctctcccgtcgctttcatcttcgttccgagcgtgcggtcggcatgtttaaatttatcaaacggccagcgcgggaatttgacgatgacataatcaagcgccggttcaaagcttgcataagtagagcccgtcagcggatttttcagttcatcaagcgtatagccgacggcaagtttcgccgccattttggcaatcggatagccggtcgcttttgacgcgagagctgaagagcggctgacacgcgggttcacttcaatgacatagtactgtttgctgaacggatccagcgcaaattgaatgttgcagccgccgaccacatccagcgccgaaataatcgccaggcttgctgaacgcagcatctgatattcttcatccgttaacgtctgggacggtgcgacgacgatggagtctcctgtatgcacgccgacgggatcgatgttttccatgttgcagacggtgatgcatgtatgattgctgtcacgcatgacctcatattcgatttctttaaatccggcgatgcttttttcgacgaggcattggctgatcgggcttgctaacagcgcctgtttaatcagcgtctgaaacgcttctttcgttttcgcgattccgcctccctttccgcctaacgtatacgccggtctcagaataaccggaaatccgatagactcggcgaaacggagggcatcttcttcgttgtcgacgatttcgctttccggaacgggctgatcgagctctttcatcagggcgcggaactgctcccggtcttcgcctttttgaatggtttccaccgatgttcccaaaagcttgacgtgatgcttcttcagcacgcctgcttcttcaagcttaacggctaaattcaatgccgtctggccgcccaaattggcaagcagaccgtccggtttttctttttcaataatggcctcgatgctgtcggttgtgagcggttcaaaatatatttcatcggcaaacgcctcatccgtcataatcgttgccgggttgttgttaactagaataacgcggtatccttcttctttcagagccatgcagccctgcgttcctgaataatcaaattctgccgcctggccgatgatgatcgggccggagccgatgactaatatgctggaaatggttgtatctttaggcatgagcgatttctctccttgctggtatcactttctctagaaattcatcaaatatccactcgctctcagccggtccgggatgagcttcagggtggaactggacgcttaatacgggaaggcgcttatgaatgagcccttccaccgatgtatcattgacatgatgaaatctgatggacagctcgttttcgtcaattgatgcttcatcaacgacatagctgtggttctggcttgtcataaacacccgtttcgttttccggtcaatgacgggatggttggcacccctgtggccgaacggcagcttatacgtatttcctccgaaagccagggcaatcagctgatgcccgaggcaaatgccgagtgcggggaaatcactgagtaatgatgtaatccggttcatgtacggcgcaatcgctttcgggtcgcccgggccgtttgagagcacgattccgtcaggctgaatgtcgtaaacagcgttcatctgctgatacggaatgaccgttactttacagccgcgctttacaagtgacgaggcgattgattttttataaccgaaatcaatcagcgcaatatgccggtctccgttccccattgacgtgatgtcttcagactgcgccagctccgccgggttttccgttccggatgctgccggaatttctcctgttgttgacacggcagcgttcatcgtgccgccggagcggatggttttgacgacggcccgtgtgtccacttcggttaagagcgggatgttccatttatttaaatactctctcaagcttgagactgcttcatggtgagaaaaatgttcacacgcttcatagacggcaacagccttgacttgaggaatcttactttcaaggtctttttcattaattccgtagtttccgatcagcggatacgtaaagacgacgatctgacccttatatgacgggtctgtaagcacttcctgatagcccgtcattccggtgaaaaaaaccgcttcgccaacacagcgggcctctttttcaagttcaccgccaaatgatgttccgtcttccaatactaaatagcctttcatctaaagcccacctcttgatgaataattaattaaaaatatgaatttttatacttttatatcgaaaaaaaattaccgtttcactgccgaatgcgcttcgatcgctgctttcagcatactgacggccgacagcatttcttcttcagaaaccgtaagcggcgggagcagcctgatgacattcggtccggccggaagcacgagaagcccgcgttcctgcagatctccgatgaggccggacacgggacctgcgcattcaatgccgattaataacccttttccgcggatttcttttacaaaaggtcctgtcagttcacggttcagctgcgcttttaaaaatgatcctttgtctgccgccgcctgaagaaagtccggctgaaacacaatatccaaggttgctttcacagctgccatggcaagtttattgccgccgaaagtcgtaccatgcgtacccggcgtaaaggcgtcgccaagcttctttttgccgatcacggctccgacgggaaaaccgtttccaagccctttcgcagcagtgatgatgtccggcgagatgccgaaatgctcatagccgaatgccttgcccgtccggccgattccggtttgaatctcgtctgtgataagcagcgcctgtttgtctttgcaaaatgtctgtaaggcttcgatgaattccggatcggcgggattgactcccccttctccctgcaccgtctcaagcatgacggcggcgatatcatcctcttttgaaagcgtgctgaatgccgacggatcattgaacggaagatagtgaaagccttgaagcatcggtccgaaaccaatcttgattttgtcttgtccggtggcggccatccccgcataggtccgtccgtgaaaggattgatggaacgttacgatttttgtctttcccgttgctttacgggcaagcttaatggcgccttcattcgcttcggccccgctgttgcagaagaaaacgagatcccccgcgctatgttcggcaagctttgccgcggctttttcctgaagatcattttcaaacagattggaaacgtgccatacactgtcaagctgttctttcaccgcttctgtgacctcatcatgacaatggccgagattggaaacggcgatgccctgaataaaatcgagatacgtttttccgttttcatcctctgcaattgtccctttcgcttttttgatatcaatgggccagcggctgtaggtttgaaatagactgctcatgacacgctctccttttctttgacaatttttgttccttggaaggcttgatcggtaaaaaacgctccttttccgtttacgatcatcacttcctcgacatcttcactcagtgccgataatgccgagtttaccttcggaatcatccctcctgaaatcacgccgtcatctatgagggcgtgagtctcttgcggcgtcaaagtatccagcctgctctctccgtccataattccttcgacatccgtgacaaataaaagtttgtcggcgtgtaaggctgaagcgacggccgatgccgcggcgtctgcgttgacgttcagcgtttcgaaatcacttgtcatggaaagcggagcgataacgggaatgatgccttctttcattaatgcgtgaatgattgacggatcggttttttgtatttcgccgacttctccgtatttgtcttgattaagataggatgcttgaaggagaccgccgtcctttcctgatattcccgcggctttcagcccgtttttcgcgagttcggttacgaaaaatttattgatcgtccctgacaagaccatttccgctgtttccagcaccggtttggtcgttttccgctgtccatcgacaaattccgtttcaatctgcaatgttttcagcattcttgaaatgtccggaccgcctccatgcacgacggcaatgttccagccggattgcataagctcttttacattttgaaaaaaatcggcggataactcgcggattacgctgccgccgcacttaaaaacgatcgttttcttcatgccgctcccctttgttatgtgcgatagctcgcattgattttaatataatcataggttaagtcacagccccatgcccggccgctgccggagccttcctgcaggcggactgcaatcgtaatttcatcacctgataagtactccttggcatcagtttccgaaaacggctgaggttcgttgtgtttaaacagacactggccgccgaggaaaacttccacttgttcggccgttacgcttgccgcactgtgcccgattgcgccgatgatgcgcccccagttggcgtctgtgccgtaaacggcggtcttcacaaggcttgagccgacgatttttttggcgataatattcgcctcaaggttgtttttcgcgccttcgactctggcttcaattaatttcgtcgctccttcaccgtctctggctatatctttggcaaggtcttcgcatacaagctttaatccctttttaaaagccggccagtcagggtgctgctccgtcaggcaatcattccccgcgcagccgtttgccatcacaagcaccatgtcattcgtcgatgtttctccgtcaacggtgatttggttaaatgaaacatccgtaatctctctgagcgcgtttttgagcgcctgttcttccacggccgcgtccgttgtgacaaagccgagcattgtcgccatgttggggtggatcatgccggagcctttcgccgctccgccgatcgtgatgatgtctccgccgatcaccagttcataacacgtctgtttcgtcactgtatccgtcgtcaaaatggcttcttcaaatgctccggacacggacggcgcttgaccgagctgttcaatgcccgcttgaatttttttcatgtctaaaagctcgccgatcaccccggttgatgaaaccgcaacaagctccggctcaatgccgagctggctcgcgaagccgtcccgcatttcataggcgtcctttaatccttggtctcccgtacaggcgttggcaatcgcgctgttgacgataaccgcctgaagcacaccctcttttttcaggctggcttgcgtcactttcagcggcgctgcctgaaaatggctctgcgtatataccgctgcactgactgcaggcgcttcgctgataatcgctccgagatctttttttgaatagcgcagaccgcaatgcacgccctttgcctcaaaccctttcggcgaggatacgccgccttttattttcgtgatttcctcactcagctgaatcatatttttgaatccctctttcgttctatggatagactggcgtcatcgtaagtcccgtttcttcctgccagccattcatgatatttaaattttgaaccgcctgccctgcggcgcctttcatcagattatctatgacagaaacgatggtggcacggtttgttctttcatccacggtgacactgatatcacaaaaattgctgccgtatacctctttcgtcgccggaaattcaccttccggcctgattctgacaaaatatgaatctttgtagaattcggaatacaatcctcttacctgtgcagcagacattcccggaggggcgtcggtatacatcgtcgccataatgccccttgtcatcggcgccaaatgagcggaaaacgtgatcgggcctgtgccgggctgccaagccgctaattgctgttcaatttccggagtatgctgatgctcattaaccttataaattttgaaattatcattcagctcagaataatgagtgcccatggatgcttttcggccggcgccggatacgcccgttttcgcatcaacaatcagaaatgaatcttgtaaaagcttattcttcgccagcggggcgagcccgagcagcacagccgtcggaaaacatcccggattggcaatcagctttgcagtctgaatctcttctttttgcagttcagctaaaccgtaaaccgcgctttgaatcgttcctttcggagcggccttccgcttataccacttttcatacacggccgggttttgaatccgcagatcgccggatagatcaatgaccgggatgcccgcctccgccagcttgggcgaccactctccggaaacgccgggcggcgcggctatgaacatgacatcaatttcgtttcggatcgtttctatatgaagcggctgaagtgattgtgacgctatattcctcaaatgcggatatgaagcggcatattcttttccttcgtcgctcgatgaatataatatacaatcttctgcataagggtgatggttaagaatcctgacaagttcggcgcctccataaccagtcgcgcctataatacctattttcaacgggttcaccttcttggtttttgtgaaattatttaacattataacatgaataaaaattaattcaattgtatatttaatattttttcattcattttccatctgttttcgctgacaaaaaaccccctctcgatcgagggggggcataaaaaaaaacaggctgctcggatcagcctgtttttttcagcatcatcagcccgcttataaaaaacagcacggagctggcgtaaaaaataatataaaccgtaaagaaatcagcgagaaacccgccgagaataatggcggcagctgaaaatacggccgtccagaaatgatagctgccgactttttttccccgctccccgccgtcggtgtaatcggcgatcatgattttctcgccgtgtttttgcatggcgccgaacaggcccaaaagcacctgcacaacataaacctggtgcacgccggtaatgtgcgggagcgtcagaagaagcaccgccatcccccacgaatttgccataaggaaccagcgggaatccagtcttgccgacagccggccgagcagcggatgaatcaatgcgccgctcaggccgaacaagccgtatgaaagaccgaattgcgtgtagctggaaccgatgtttttaataaataaaatataaaacggaaagatcaggctgccggcaaaaaagacactgctctgagacaggatcagccattttaaatggttgtgtttcatgatttgtacctctgataaaaataattcataaacaagtcatccggatcatatttgtgttttttctgaaagaacatatcgcttttcggatatgcctcgcgcatctgctctttcgtttgatacagcatatacgggagataataactgccgcggtggcgcaatgccgtatccgtcatttttctgacaatccgcgcagcactcgcctggctgtctgttgaaaacccttcattgattaaaagaacgagtgaaaacatgtcttcctttgcgtatgacagatcggctttttcatttttttgcacgtaacggatcgtaatatttacgagattgagatcttcatgtgacagcgtcttgcgtaaatcatgaatgtacggcgcaaattcgcccacgggcacgaagtattcttgtagcacgtcggtgttgtccgtgttttcatattccaaaaatttcgattctgaccgcatgacattgttcctggagactttcacgccgttttggctgagaaaataagactgctgggttgaccagaaccaatttcttccccagtcataccggcgggagaggccgagcgcgaatttcgtcagcgccggatgctcatcttctttcagttcattgtgccgttttaattctttctggttgtctgagagtgtgtaatcagtcacatacatatcgtgcaaaaagcctttatcccctgttgcgatccgcgcgagatgcatgcgcacggcggggttgcgctgaacatgctgcgtaaaatattgactgtatgtatcagcgttcatgcgtttcgttttcatttcataaagctcatcatccgtcagctcaatatccgcgtcaaggatgacgccgaacaggccgtagccgccgatgacggctgaaaacaggtcatctttcggagtaacggtgatgactttgccgtccgcctttaaaagatgaaacgatttgaccgtatcaatcagcgaaccgtaccggatatcccggccgtgggcgttggcgctcagtgagccgccgatcgtaaaaatgttttgcgattgcatgacttttaccgcgagcccgtacggattgacatagcgctgaatatcattccacgtcgctcccgcctgcaccctgatgatttttttctttcggtcgagaccgagtattttgttgtagcccgtcatgtcgagaacgataccgtcttcataatacgtctggccgcccattgagtgttgggcgcctgcgattgagatcttcaaatgctttctctttgcttccttaatcgtttcgaccaatgtttctttctcttttcctttgaccgtctgcttaattttcacgggcatgagacggctgacatccgtcattgtccctgcctgccgctccggctctttgtgaaaggcggaaacagcgaatagcgccgtataaacaagtatgctaaggataatgagaagtaattttttcttcatggattcctccctcgcatgcagccggtctattatatcatgcctcacgtccgtttttttcctttttaacccgataccgcaaaaaaccccgaatggtgggaaactcgggtttttttagtgacttgcccttctttccgcacgccggtctctagcggcaaagcagacagaatggcgcccgacagaagaatcatgtttagtacagctcgaaacggtcagccggaaaacaccgggcataaaaatccacagaaatccttaaaatgattttttagtcagtatataatcgatatatatgcagatgtattaccaaagggattgtttaaaacaaacatgttaaacgaggtggggaaaataaacataaaaggaatcaatcatcttcttttttctgtttcaaatttggaaaaatccatagtattttatgaaaaagtatttcatgcacaactcttggttaaagggcaaaaaacagcatattttgatctgaacgggctttggcttgcacttaacttagaggcggatataccaagaaatgaaatacataaatcttatacgcatatggcctttacaattgacccaaaagattttgatgcaatacatcaaaggttaaaaaatctaaatgtaaatatattaaatgggcgtcctagggataagcaagatcataagtcaatttattttactgatcccgatggacataaatttgaattccacacaggtacactccaagacagactgtcctattacaaaaaagataaacctcatatgaaattttatatttaaaggtttgtttgcgatccaaaacaaaccctcactgtcgcttatccgcgttgattttttccttgtaaatgcagacaaaagaaaagcacctccaaactttaggatgtacctaaaatccgaggtgcattttcttattactgaatccctaatgcgatttttgcgtagcgtgacattttgtctcttgtccaaggcggattccagacgatgtggacctccgtctcttttacatccggaatgtcggcgagcgcttttttcacctcgtcgacgatgatcggagcgagcgggcaccccattgatgtcagtgtcatcgtaacatgcgtcaggccgtcgtcatccatatcaacgtcgtatacaaggccgagattgacgatatcgacgccgagctcagggtcaacaacctgctccaaggcgcccatgatgttttcttttaatgcttcttccacgttccatcactcctttttcctcagtataacgtaaaagcgggttttgttaacacctttgtgctttataaatgcttatcgaaccaggcgacggtttctaaaacggcgtatctcgggactttatggtcagcccgttcgtctttcagaaactgaagatggtcaggccggctgctgtaatgaggtttaatcgtttcataaaaaccgcgggtcggtgcatacggaacgactttgtcttgaacgccgtgccagaacagcagcgggcggctgcggagtttttccggttccagactgagatcgaacggtttgagccgtgcaaacagttcatcgacctgttcttttgtgacgtcaatgtcgatgtcctgcttttgaatgtggtcaatctgctgctgaaaaaatgccgtatagttcgggcttcccatcagactgacgccggctttgacccaatcatacgcggccatcgcgccgaatgtcgtaattccgcccattgacgtgcccgcaagaccgatccgcccgtcttcaatcagacctcgcgcttcaaaatcctttttcagcacgtcaagctcctcgatttcatttaatacaatgtcccaaaaatggacggcgagctcttctgctgacagctgttcagcgcgttcaccgtggtaaagagcttccggcagcacggctctgaagcccttttcagcaagcaggtaagcgaaatgaagattatgctccttcgcgcttgtaaaaccgtgaataaagaaaacaaggggagcgggacggtcccgattttcttcttttacaatatgtaaaaacggaatgcctgatacggtttggtgatcaattagaatcacgttgactccctccttaggataaccataatcataagtgtaacatgtagacaataaagatggtaaaaagctacactgtacataagtgaaaaacagcaaattatatgacaaaaggagttatttatggagacaaaaccttatctcatcgccttagatctggatggaactttattaaaagacgataaaaccatttcccctgaaacggcacggacgattcagaagctgaaagaagcgggccatcatgtctgcatctcaaccgggcgcccgttccgttccagttcgatgtattatgacgagcttgggctgacaacgccgattgtcaattttaacggggcgtttgtccaccatccgaaagacgaatcatggggacgctaccacacgtctttatcggtcgatgtggtcagacagcttgccgaacttacagagacctatcaaatacataatgtgctcgctgaggtcattgatgatgtgtacttccattatcatgatgagcatttaattgaggcgtttcatatgaatacggcgaatgtcacattcggcgatctgcgtgaaacggtcaaggaggatgtaacgtccgtattgattcacgcgaaggaagaggacgtcgcggacatacgcgcgcatttatccgatgtgcacgccgaggtcattgaccacagaagatgggcggctccgtggcatgtgattgaaatcattaaacacgggatgaataaagcggtcggcctgaagaaaatcagcgactattaccaagtgccgagagaacggatcatcgcgttcggcgacgaagacaacgatcttgaaatgctccggtttgccgggtgcggcgtagcgatgggaaacggcacggatgaagtcaaacaggccgccgaccgcgtcacgggatcaaatgaagcggacggaatcgccgaatttttaaaatcctatttctccctgtgaggttttgccgctcataacacaaagccttccgcccatactaaaacagacgactcatctcgtctaaatatggaagggggacattgcaatgggtaaacgaaacaaatcaaaacggtttattcagcaaggcaaggactctgtcagtcttcatgacgcaagatttccatatcggtctacattagaggaagcacagcatgatgcagcaaaagattcggctgaaaggcaggttgacttttaatgagaaacgaactgttttctcaagccaagtcatttgtccagcaggccgtcatgattgctaacggtttcgaggacggcgatcaggaaaaagctgtctcacgcgccaaaaacgccgtgtcttccgcgtacgccaattcgacggatgcagaacgtcagcagctgcaccaatttcaggatcagctggagaaattgcaataaaaaaaggcgccccgtttagacgagggcgccgcttttttatttcacttcaaatgtttttaccgttttcagtctttttccgatctgatcggacttccctaaaaacgtcaccgtcaccgtgtatgttcccggaccgggcacgttcttccacacatctgaaaagtcatacgtttcattcggcattaaggtcacggtctgaaacgcctgagtaaacattttgtcttttgaatagcggtacagttctttgtgatgttggtcatgtacggtcaattcgaatttctgccctgaactgaatgtgaaatcgatcgggctgccgctcttgttttttaaagacatttgaaattcgatctgctgatccgtctgcacaggttttacggctaattccgcttgctgttcattcatctctccggatacctcctcagcgggctccttctgcccggattgactgctgcatccgatcagtaaaatgaccggtaataacaggccaaacagccacttcattctatccgctcctatcagtcttttctgaagaaaccaaagatccccgtcgtttgcacgatgtttgtgaaggctttcgggtcgacttctttcacgattttctcaaggtcatacaattcgtaccgcgtgatgacgatgatcatcatttctttctgttcgtttgtgtaagcgccttttgccggcaccgtcgtaatgccgcggaccattttcccgtaaatcgcttctttgatttcatcggctttttttgtaacgatcatggcggtcagtttcatgtggcgggtgtgaatggcgtcaatcacccttgttgtgacatacagagcgacaagggtatataatgctttctcccatccttgcaataatcctgccgtcaaaatgataatcccgttcaaaatgaagaaatatgtgccgaccggcttatccttccatttggccagcaccatcgacacgatatcaagaccgcctgtcgaagcgccgaatttcagcgttaaaccgatgccgatagccgagatgactcctccgaatacggtattcagaagaatatcgtgcgacagtctcatttccgggagaattcccataaagacggacgtcagcgctacgcttaatatgctgtatacagtgaatgatctgccgactttcagccaccctaacacaccgatgggaatgtttaagaggaacatgagaactcctgtcgaaatataaaagggggcgtattgatcaacgacgcttgacagcagctgggcgacaccggtaaaaccgctggcatatacattcgccggtatcaggaataaattcagtcccgccgcatacagaaacgcgccgatgacgacgattgctaatttttttgcttgttctagtaccatggcttgctcctccgctcattttcattattagcttttcccttaaaataaagttttgaacactattttgccacatttatatgatatagttggcatcactctcaccaatcggaaagaagggaattatgatgacagttcaccttattgctgacagcgcctctgacctgccgaaatcttatattgaagaaaaccggatcgggttcattccgctgcacgtaacacttgacggaaacgaatatgaggacgcggtcaccattcaggcggatcatatatttcaagcgatgcgggacgggaaagttccgaaaacatcccaggcatcaccggatacgataaaaaaagtatttttacaatacgcggaactcggagaaccggcgatatacatcgccttttcctcaggtctttccggcacctatcagacggccgtaatgatcgccaatgaagtaaaagaggaatttcccgattttgatttacggattgtagattccaaatgcgcttcattgggctgcggccttgctgtgatgcacgcgcaaacactctgtgttaacgggaatacaatacaagaaatcgaaacgtctgtaaagagcttttgcgcacggatgaaacatatatttacggtcgatgatgtcgcttatctcgcgcggggcggcagaatttcaaaaacgtccgcttttgtcggggggcttttgaacattaaaccgattctgcatgtggatgacggcaggctcgtgccgctcgaaaaattgcgcggacagaagaaactgtttaaacggattatagacatgatgaaggaagaaggcggcgattgggcggatcaaaccgtggggatcagctatgcagataacgaggagacggcgcttcggatgaaggaaatgattgaagaagcgttccatccgaaagagatcattcttcattcaatcggctctgcgatcggcgcgcactccgggccgggcacgctcgcgatttttttcctgaagccataatttcaatgcgggcgggcatcctaacggacagaagggaggctttgccgcatgaaagatgatgacaaaaaaccgttggacaataacgccgtaaatcagaaaaagaaccggcttgccgaaaaaaaccggcaggcgggaaaaaaccagaattccaaaaaaccggaccatctgtaaaagcaaaacagccctcttgtgtatgaagatagagggctgttttttgttctatatgcgtctaacatcacttatcacgaatccgctttcaggcaatgccggcattctggacaggctgaagctcaaatcttgggacggaacaccgtactctatttcattggcaagaaacgcaagggaagttttcatgacttccacggtcattccctcacccggacagcggtggccgttagccggatcacctccgccctggggaatgaaatcaaatttattttcctcccgcccctgaaaacgttctgggcgaaattcattgggatcctcccaaagccgggaatcatggtttgtcccatataggtcaagcatgacggatgcaccctttttaaactcacagttcttccatacgaaatcttttttcacaacggctcctaaaaacggggcaaacgggtaataccgccgaacttcatgtgcaaatctttcagcctcctgatcatctctcgatctcagtttgcaccgatattcagggtaatcatgcaatgcaagagctgaaaacgtaatgaagtaagaaatggcggcaatcgggcgcagaacattaataagctcaacagcagccatgtgagaatcaagtctgttcccgtcaagttctgtatgaaaagccatttcatacaaggctgagcactccggcgtttgcagcttgccggaccgcacatcctcaatgacctcctctatccatttctccgttttcagcctcgcccttctgcctttccaatgacgcggtccgacagcgccgaatgcgtctaccatatcggtgaaatcctccgcccgctctttcacttctgagtctttcagcgggacgccggcccactcacaggcagcccggcacagcactttcttcgcttcatcaaaaaggacaattcgatttgaaccctcccacttttccgcagatgctttccactgttttgccaccgcttccgcaagccgtttttgccggggcggcgtcaacagcgacataaatagaagcttcctgtgcttatgccgttcaccgtccattgactggattgcccctgttccgaataacgttttctgcacccgtttggggagggcatgctcccgctgaaatcgttctgtgtcataaaaaagctttgcggcttccgctccgctcatacaaatgaatgtcttccctaataaacgggcgcgaaacacatccgagcgataagtctccgctctgtttttcacaaatacatatccatcgcgtaataaagccagactattatcaagacccttatcatgcggaatttgttcattcatcccgattcctcccttcttttttcaccttttacgaaaaagaataaatataaacacaagtatattcagtatttgtgtttcattcagaagttactcatgtcaggctgcaaaaatcagggggcgggcataagcccgttacaaagtaaaccggcggacctgatcgtttaaccgctctgtcaggctcaccagattattgacgctttccgccattttatgaaaagaagacagctgctcaagcgcggaggcagaaatctcttcgcttcccgcagctgtttcctgaacgacggcgctgatgctttcggcatgatgcagcacttgctcaccaagctgtttcgattcgatgatccgtccgtccaattgagtaagctccgctttaatatgggcggctttttgttcaatatggacgaatgattctgacgttttctccatcagctcctgctgtctgtccgctaaagcgacgccggtcgtgacagctccggtaatagatgtgatgccgtcttcaatttgctttaccatatcgaaaatctgcgcggtcgctttggctgatccgtctgcgagcttccgtatctcctcggcaacgacggcaaatccttttcccgcctcgcctgctctggccgcctcgattgcggcgtttaatgacagcagattggtctggcccgcaatgtcagaaacggtctgcgccatcatactgatgcctgccgcatgctctatgaagagatcggcggcttcggaaatctcttttgatgtctcattgcttttatcaatggcttgcttggtctcggctaaagcaccgcgccccgcagccaccgccgcaatcgtctcttcgctgcttctcgtcgtttgttttgaacgttcggcgttcgcctttgaatgttcatccatttgttcaatgaattgcactgcatgctgcagatcttctgaaatggtttgggagccttgcgccatttcttccgtcgacacggacacctgctcggtcatgtccttcagcgtctggttttccttcgtcaaaccttccgcgaaagtctcgacttcacggccgacctctccgatcgcctgaattaaggtgcggagctgttcagccatcattccgaatgagtcattcagctctttcagttcgtccttccctttataatcaagcatttcaacagcaaggtttcctcctgcaatacgacgggcattttcagccatgcggcggatcggccctgcaattctcttcgtcagcctgatggaagatatgacggtggcggcaagtatcacgatggtcagcacggctgcgctgtaaacgataaactgaatctggtcagccgtctgcttctgcatgtcttcatagtgatcccggcttttcagattcagcatataaatatcattcagaagaccgttgatgcgggccgccgtccttgtcgcttcagccgggcttttcgaatcaagagcagcgtccgcctccgcctgccatgattcgtattttttggcgagtttgtcataagcggctttgtctgcaccgtccgtcatcgtttttttgagcgccgccagtttgtctgagctgcttttcatatagcttcgcacatcttctttctgggcgtctgcgagcgtataggaatagccggtgatgctttcttttaacgtattaaggtcagcttttgcttcctggacgtttaacagcgcgtccacttcatcttcatttgaagcctgaatattcatcatgtttacgatggtaaagccgatgacggcggcgaagcaaatcatcgtaacggctgcgttaacgagcagccttgtccgtaatgtcacttcagatcgcctcctttttcaatcatactgtttttcatatccgtgatctttttcgtcagcccgcctgcgtttttgacaactctgatcttggctaagtccatgccgttttccttcagtccgtaaacgatctcaccgcttttgatctccttgttgtcttttaaatctttcgccaattcatagatgacatggtcgacgtttttcactaaagaagagataacggcgtgctcggcggtgtaatattgatcgctgtcaacaccgatggcgtatattttttgcgcctccgcttctttcagtgcgccgacacccgtgaagccggccgccgtaaacaggacatcggctttttttcggatcatgttttgggcgatgcccttcccgagcttatcatcgtcaaacgtaccgctgatgtccgacagcactcggatactcggtttgactgattccgcgcctttcagatagccttttttaaaccgtttaatgacgtcggcatctgaaccgccgataaatccgattgtgccggttttgctcgtcatggccgccagcgctccggctaagaagcttccttcatcctctttaaacgtgacggaggtgacattatccaggtctgatacggaatcaatcagcacaaaccgctgcttcggatattttttggcgaccttttctaaatccgcctgcatgctgtaaccgagccccacaacaagatcattgccttcccggacaagctgggtcagtcctttttcgtatgtaccggtatcttttatttcccgatagtcaaatgtgatgccgagctcgtctctcgctttcatcaaaccttgaaagcctgaatcattaaatgattggtcgccgaggccgttgtctgtcagcatgatgccgattgttttcgttttttcggccgccgtttcctcagatttgccgacacatcccgctgtgctgagcgcaatcagcagtacagccgcaaatatcgccatttttctcattgaaactctccttttgtttttttctatagttatatatcggttcggatgtcagaatattttatttcaataaaatatgtatgttcggcaggatgttaaacaaatgagggcataggagcttttgagaaaataaaaaacatcggttttggttcaccgatgtttttgcagaaaatttattgtttttcgtatgtccagccgtcttcctgatagaccttgccgtttttcatcagatgcccgagcgcccgcttaaaggcggctttgcttaaatgaaaccgttcgcggatatcgtcaggatggcttttgtctccgtaaggcatcgcgccgtttcttgatctcagataggtcagaatttcttccgcgtcaaccgaaagcgcatcctgctttctcggcagcagtgacatgttgacggagccgtcttccttcacctcgatgacacgccctgtcacgcggctgccgagtctcggctcttcttttctttctgaagggtgaataaacgcgcggatgccttcatcggtaatcagaaaagagcctgatgcaatcagtctgtacaccgtgcccgtcaggtctttattcatgacgtcttcctctgcatccgtaaataattcactgatgatatcttcaggcgccggcttggcaaacatgcgtccgcggcttgtcaccttcagcatgcaatacagtctgtcgcctttttgcggccagacggatttgtacggaggcaggtgctccgttgcgacgagcgcgtcttttgacagaccgacgtcgacgaatacgcccatatcctccacagcgtccgtcacttccacccatccgtagtcataaaagctgatgagcggctttttcatcgtcgccgcaagtctttcctgatgatcgacgtaaataaatacgtccacttcatctctgtcttcgatatcctctgtgatttcactgttatgtaaaagaaccgtatcctcgccgtcggttaaaaaataaccgaaatcggtttggtgatctatactaagcgtgagctgctgccctggtctcatgttatcgtccttcctgattcgcccgtatgaggctgatgtttttctcattttttccaacatgcataaattcatgctttatgctgttggacatttctctttattctactataatcaactcataagtgaaatgttataggaggttttctcatggcaaaagaaagttcttttgatattgtatccaaagttgaatttcccgaagtgcagaatgcgattcagatgacgctgaaagaaatcggcacgcgctatgactttaaaggatcgaaaagcgatgtaactttagaaaaggaagaactcgtcctgatttctgatgacgagtttaaactgaatcagctcaaagatgtgctgagcggcaagctgatcaaacgggacgtgccgacgaaaaacattgaatacggcaaaatcgaaaatgcatcggggggcacggtgcgccagcgcgcgaagcttgtacagggcattgataaagacaacgccaaaaaaatcaacgcggtgattaaaaactccggcttgaaggtcaagtcgcagattcaggacgaccaagtgcgcgtcaccggaaaaaataaagatgatctgcagcagattattgcagccgtccgcggagcagacctgccgattgacgttcaatttattaattttagataaattatgtgattcctattgattattgtctctattttcggtaaatttggagaaagggatttccacagttaagttttggaaacccataacaattacatgaacgttcttatcaagagaagctgagggactggcccgacgacgcttcagcaaccggtgtagtggtttacccaaaccatgaccaaggtgctaaatccagcaagctaaaaacagcttggaagataagaagagagacaaatgattacaaagtcttcttcttaagaagactttttttatttctcttttttccttgctgaatgtgacgaaggaggcaaacaatgggactattacaagacttaaaagaacgggttttaatcggagacggcgcgatgggcactctcctctattcctacggcattgacagatgttttgaggaactgaacgtatcaaagcccgaagagatcaagcggatacataaggcttacgtggaagccggggcagacatcatccagacaaatacgtacggcgcgaattttattaagctctcaagatacggacttgaggacgaaacgaaaaaaatcaatcaggaggcggtcagaatcgcgcgcgcttcctcagacggcgcttatgtattgggaacgatgggcggcatccgcacctttaacaaaaacgcctacagcctggaggagattaaacgcagctttcgggagcagctttatttattgctgcacgaagagccggacggtctgcttctggaaacatactatgatttagaagaggcgcgcgaagtgctgaagatcgcgagaaaagaaacggaacttccgattatgctgaacgtatccatgcacgaacagggcgtgctgcaggacggaacgccgcttcgggaagccctcaggtcaattgccgatctcggcgctgacataacgggaatcaattgccggctcggcccgtaccacatgattgaagcgctcaccgaagtgccgattttcagtgacgcttatttatcggtctatccgaacagcagccttccgtctttagaagaaggccggcttgtttatgatacggacgatgcctatttccgggagagcgccgtacagttccgcactcagggcgcgcgcattatcggcggctgctgcggcacgacgccaaaccatatcagagccatggctgaagcggtccaaggactttctcctgtcactgagaaagaagtgaaaatcagacgggaagaagaagtcatctcagtccgcaacgaacggaccgagccgggtttaaacgaaatcgccgctcaaaaacggtcaattatcgtagagcttgatccgccaaaaaaattgaattttgacaaatttctgcaagcggcggctgaattaaaagaaaccggcatagaagcgctgacgctcgccgacaattcattggcgacaccgcggatcagcaatgcagcctgcggttcattgctgaaagagcgtcttgatatccgttctctcgttcacattacatgcagagaccgcaacatcatcggccttcagtcacatttaatggggctggatacgctcgggctcaccgacattttagccatcacgggtgatccttcaaaaatcggcgactttccgggggctacctccgtctatgatttaacgtcctttgacttgatcaggctgattaaacaattcaacgagggcatttctttatctgggaaaccgctcggcaagaaaacgaacttttccgtagccggagcatttaatccgaatgtccgccaccttgataaagcagtaaaacggctggagaaaaaaatagagtgcggagctgactacttcgtgtcccagcctgtctactcggagcagcagctcattgacattcatcatgaaacgaagcatctcaaaacaccggtgtatatcggaatcatgccgttaacgagcagccgcaacgcagagttcatccatcatgaaatcccgggcattaagctgtcagacagcatccgcgaaaaaatggcgctcgccggcgaagacaagcggaagcagaaagccgaaggcctcgccatcgccaagtcgcttctcgacacggcgtgcgaactgtttaacggaatttatttaatcaccccgtttctccgttctgatttgacgtcagagcttgcagcttatattaagcaaaaggatgaaaagcgggctgatgtatatttgcattgacgcgaaagaggccgcctgatatgacaggcggctttttcatggtacgatacagaaaaagaatcaagcaaaggaggattttttcatggttgaagtaaaacccatcaccgcagaagacacatacgcgatcagacacagcgtgctgcgcccccatcagacgattgaggattgtaaatatgatcaggacagcgtcaaaggagcctttcatctcggaggtttttacgacgggacattgatcagcatcgcttctttctacccgcagaaccagcaggcgttacaggcagcgcccgcctatcagctgcgcggcatggcgacgcttgaggaataccggacgcaaaaagcgggaagcacgttaattgcctatgcagaacggaaactggcagatatgggggcggcgcttgtctggtgcaacgccagatgtcacgtaaagggatattacgaaaagctcggctggaaaagcacgggcagcccctttgacatacccggcatcggcccgcatgtgatcatgtataaagaactcgcctgaaacagacaaatgcccttggggacatgtctctaagggcattaccttgaatgtcacgcctgcttttatatgcggtactattgacgccctcccgcttttttaataccctttgtacattacgcaacagcaaggatggcaggcagaaaacgatatctgtcaattgccgttttcagctattaattcagaaaaggaagtatgagatgaatacgatccaaaaaccgaaaatcccgaaagaattgccggtgctttctttcacagaagcgcttcaggacgacctcataaaagaagtcgtcatagagaacgccgtcgtaaacagcaaactggacggcctgcgcgccgaaaaagtcattttcagaaacaccgtttttacggatgtctctttcagacatatggaatgtaccgatgtcctgtttgacaaatgtgatgtctcaaacgctgatttcagcggaagcatcatccatagaacggcgtttcagcattcaaaacttctcggcttgaatctggcggattccgccatgcgtcatgtacggtttgaagactgcctcgcaaattacagctccttcagctattccaatatgaagcatgtccggtttgacacgtgcgctcttacagaaagcgagtggaatgatgccgttcttgaatacacagatcttgacgcctgtgatttgaacggctcaaattttatcggcacgtctctttttaatatggatatcagcacgtgcacatttgatcatctgcatgtctcacttgagaagctgaaaggatgccgcatctctccggcgcatgccgttacattcgcagaagcgctcggagccattgtgacgtgatcttttattaaacgaaacggcgggcgatgtccgctatcgtttgaatgcctttttccaagtccggtaaggatgcgtacgaataggaaagacgcaggctttgccggtcttcgggaagatagagagctcccggattgatcagcacgccggcatccaaggcacgggtgaaaagcgtctgaacggcgattgcttgatgaaaagtgacccaaaaataaaagcccccctccggcacacgccactccgcaatatctcccgcgtatctttcaagagaacgcaatgccgcatctcttctgattttgagttcctttctgagacgcaaaaggcgcgcttcatagcggccgcttgacagccattgacatgccgcccattgagataaagcactggagccgtaatccgtctgcattttaatatcggcgagcctgtctgcaaccggctcaggggcgacgacccatccgatgcgcagacccgggcttacggtttttgacagcgtgccgatatacagtacattcccctcaccgtccatcgattttaacggaggcggcggttctttatcgatccataaatcaccgtatgcgtcatcttcaatgacaggcagacggtgatttcttgcgagcgcgatgagttccttccgccgcttaagtgacattaccgttccggtcggattatggaatgacggaatggtgtacagcagccctgcttcgtattgccgccggtaagcgggaagatgatccgttttcattccgctcccatccatcggcactcccttaagcctgacgcccgctgattgaaacacacgcagggaatggagatacgacgggttttcagtcagcatgacagagtttggttttagcagcccgattgaaatgagctgaagcgcctgcagcgcgcctgagacgattacgatggatgccggggacgcgtgaatcccctttgttttcaaatgttccgcgacgctttgccgaagctgaaggctgcccttcggttcttcatagccgagcgcaaaaatgttagttcccgcttcacggaacagttcggccatctcctgctcaggcagcagctcttgactcagttcacccgtccccagcctgatcagatccggacgcggctcgttttgattaatggcctgaaccaaggctgaattcggctgatgacttcccgatgtaacgtatgtgctccaatcaaggggcttagccgctgccatgatgctccacgtattgttgacgacctttgtgcctccccctctttttccttccagaagaccttgggcgattaactcatcaactgctgccgtcactgtgcttcggttgacctgaagctcctcggcgagctttctttgtgagggaattttcgtgccgatggtccattcgccatgaagtattttttcttttatatgctgttcgatctggagataaagcggtatgtgcgactcccgatccggacgccagctgttcatacgtcatccctccttctttatttattatacatttggctggttcaagtaccagccaaatggccggagacatcagcacacagtgcggctacaatgagatttagttgacgattggagggttttacgaaatgaatgcgattcttcacggagtgatgctcgctttcggccttattttgccattgggtgcgcaaaacgtgtttatttttcagcagggagcctggcaaaaacatgtgtggcaggcgtttcccgcagtgattgccgccgcggtatgcgatacgattctcatcagcgcggccgtcgcaggcgtgtcaatgattattgcagagattcccgtttttcagaccgtcatgcttataggcggctttttgtttctcagttttttaggctggcagacttggagaagcaaaccgcaggccgaacaggcgagaaaaacggttttcacggcaaaaaaacaggcggtcacggccgtcatggtatcccttttgaacccgcatgcgattttggataccgtcagtgtcatcggcacaagctccgccgcctatccgggaattgataaatggctgtttgccggtgcttgtatcgcggtttcctgggtatggttcgccggactggcattcgcgggacggctcgttcaaacggcggatacaggaggccggctcctcggcatcctgaataaatgctcggcattggtgatgtggggtgctgctttttattttgcggcgcttttgtttcgataaaaggaattcggccaggccatgttgaatgtaccggaaggaagagggggaattggaatgtcagacattttaaagctgtatcactaccacagatgggcaaatgagcaagttattcagcatctgaagacgctgcccgcggtcagcttacagcagaaactgaaaagtgtttttccgactgtgaacgccgtgcttgtgcatatataccgggctgattacatttggcttcacgtgctttacggagaaactttcgaacaaatcgtctcgcagtttgatcaatttgaaaagcttgacggagattttgaggcgattgaacatagaatgactgaactggacaaagaattcagcgaatttttaaaagaaatggagaacccggaaggtccgatctctatttctcatccgcgcctggggacgcttcagacgacatatgccgatgtgatccggcatgttgtgaatcacggcacataccatcgcggcaatatcaccgcgatgcttcaccaaatgggctataaaggcgtgccgactgactacatttttttctcatacgaatcataaaaaagcaaaggcctcccgggcctttgcttttttacttcgaatctatcataatccgatatagctggagacgcccgctttttcggccacatcgtaaattgtcattttcatgcttactgatccctcttttgttctctggttttaggtcagtccgttttccggcttacgaatttgcggtattcaagcggcgaaatgccttcaatctgtttaaacagtttggaaaaataggttgggtcctccataccgatggcgtccgcgatcgcccccattttgtcattggttgcggacaaaagacgtttcgcctccgtcattctgactttgttcgtatactggccgggcgtgacgccgagcacctgctgcatacagcgggtcacgtagtcttggttgtaatgaagagccgaagagagcgctttgatggttgttttctcctgatagtgctcctgcaggtaccgggcggcctcccatgcgactctttcctttgcggacgggatttggaacgcttctttctgaagatggagcagcagctcttcaaacagaatctgctttctgagcggcagatcggagttctcggcgctgtcatctgtcagcacactgaattgcccggccataaactgcgggcgtctcactttccctttttgcggcagggacagccggtagcgggacggctcttcaaagctccctttttttcgcctcagctccgaccagttgttcccggttgtttccgtcacctcataagccgctccctcaaaatgaagccacgaataggatgtcgtttcttcactgccttttgtcccgtaatgttcaagcccgggagaaagcagaatatattctcccgcttcaacggaaaaggcgttttcgtcttctgtaatgtagaggacgccttctttcacatacagcagatcaaacaccgggaagacccgtctcacatgggtttcgccttttttgaacactccatctcccgcagcgataaagaccgggaacggaggaactgtgaactcgagaaaggacatattttcggccctcctttttaagtcggatttttgcaagaagtttcgtttctctccctttttattataagaaaatggaggtacacttttaaacgttgattttgtcaggaaaggggttaaaagaaatgaaacaagcgattttaaaacgggctgcgttcaaacaatcctctgatcacaaactctcattatacgcgctgacttggccgatatttattgaggtttcattatatatgtttatgggaaacgccgacactcttatgcttagccaatactctgacaacagtgtggcggccgtgggtgtcagcaatcagattttaaatttaattatcgtgatgttcagctttatcgcgacgggtacgacaattgtgatttcacagtttttaggatctaaacagaaaaaagaggcgcaggaagtggcttatgtatcaataggagcgaactttgtcatcagtctcgccatcagcgccgccatattttttgcggccgttccgctgcttcatgtgatgggtctttccaatgaattgatgccggatgccaaagtctttttgcaggtggtcggcgggctgtccttcattcaggctttgattatgacgttcagcgccattttaaaaagctacggtcatacgaaggatacgatgttcgttacgatcgggatgaatattttaaatattgccggaaactttcttgtcattttcgggccgctcggccttccggtgttaggcgtcgccggtgttgcgatgtcaacgtccttcgcgcgggtcatcgggctgatcgcgatgattgtgatcgtcaaaaaacgcatcggactcggtctgacatggcaaaagatttttcacgtccataaagagcacttgcggaaactcctgaaaatcgggattccgtctgccggcgaacagctgtcttacaatatttcgcaaatggttgtcacttattttatcgccattatgggcgctcaggcgcttacaacaaaggtttatacacaaaacatcaccatgtttatcctgctgttcggaacggcgatcagccagggtacacagattttgatcggcagatatatcggcgccaaacggtttgacgacgcttatgaccgctgcatgaaaagtctgtactgggcgcttggcattgccgctttgacatccgtgatcatgaccttgttttcaaagcagctgatcggaattttcacaagcagccctgacattattgcgacggcgagcatgctgatcgccatgacgatcattcttgagcccggccgttcattcaatgtcattatcatcaactcgctgcgggctgccggagatgcaaaattccccgtctacatggcgatgatttccatgtggggtatcggactgccgctcgcttatctgttcggcattcatttcggattagggcttatgggcatctggatttcatttatcgcggatgaatgggtcagaggcattcttatgtacagaagatggcggtcgcggatttggattcaaaaagggattgcatagacgccctggcttcgttatgaagccgggcgtttttttatgcttgtgaaagccgttgtctcatgtcaccgagctctgaccggtaatgtgccgctaaaccggtaacggcgggccttgagtataacggaaacagctccagctcttcagacgcctcctcgaaatacgcctcggcctcgaatgcgatgtactcccatacattcataaaagctttgttgacggtatggctctccagctcttcttccgtatagccgaattgcttcatcacctggcgcgggagacgctttttcgcccgctcatccgtatggacccccagaagcacccgggtcagctgaatggctgctcctaatgaaacggctgcatggcggagtttctcttggttccggcgcgcgcaaaccggcagcagaagcaggccgagggctccgcctgtttggcccgcgtacatcagcaggtcatcaaactcttgatacgttactttttctctgtcagagatttggccggcgataaactcacgtaacggctcttcttcaagcgcaaattgctgccgcacatcggcgagcgcttcccacaaaaagccgtcggcgcgtgccccgttcagaaagtcttgtgccgcctgttcaaatcccccaagttcctgcacatcaagccggtcagcttcgtgaaacaaagcaagcaccgcccatgcggcccgcctgttttttggcggcagggttgagaaagtccgtttatataaaggaaagtgcgcctcggcaagctgggcgcatgtttcgtattcggtcatggtatcactcctctgtttttagtgtaccatatgtttcacaataaaaagaccgatatccttcagcggaaaccggtcgcggcactgttattcttctatatcgatacggtacgcctcaaaccatgtatggatctgggcaagatgggcgatcagctgcgggcctttcatcagctggccgaaccacggaacctgaaaagatgaaccttctgtctccagcagcatttccagcttctttctgtcaagcagggtgtgaagcacggaatctttctgttgtaaaatcgttttcagccattctgtgaccccctgcgtgtatttcgggtgatgcgttttcggataagggctttttttgcggtacaaaatatcttcaggaagcagtccttcaagcgctttccgcaagatgcctttttcccggctgccatgcattttcatttcccaaggaatattccaaacgtattccacaagtctgtggtcggcgaacggcacccgtacttcaagacttgcgcccatgctcatgcggtctttgcggtcgagcagatttgtcataaaccaaagcatatttaagtagaacagctgccgtctcgctttatctgttcccgtctcaccgtctaacagcggcgtttccgcaatggtttcttcatatctcgcattcacgtattctctaagattcagccgtttttgccacttttcatccaagagcgtgattctctcctcagtcgacctcatccaaggaaatccgtcttcttctgctgcggtgtgaaaccacggatatccgccgaaaatttcgtccgcacattctccggaaaggctcacgacaaaatcttttttaatttccctgcagaaccatagtagcgaggaatccacatcagccatgcccggcaggtctctgacgagaacggattcctccagatgttcaaccagctgatcctgcgtaatcacgcacttatgatgctgtgtgccgtatgcatttgtcattttatcgatccacgggccgtcatcattcggctgaaaggcgctcgctttaaaaaatttgctgttctcctcataatcaattgaataagtatgaaggggatctctgccttgtttctcaaaatgagcggcggctatcgcggttatcgcgctcgaatcaagcccccctgataaaaacgtgcaaaccggcacgtcagatacgagctggcgtgtcactgcatcctgaaataagtaccgaatgtgagccgcggtttcatcgaagctgtctgtatgcttttcgctctttacattccaataacgccatatggacaaaccgtcctttgagaaagtgaacgcatgagcgggacgcacctcgtgaattcctttaaacaccccgcagcccggagttctggacggcccgagtccgaatacttccgcaagtccgccgctgtctgtgcgggctttcacatcaggatgagcaaggatggctttcaattccgacccaaacagaaaggaagagccgtgttctttataaaaaaacggtttgacgccgagccggtctcttgccccgaacagccgctcgcgcttttcatcccagatggcaaaagcgaaaataccgttcaagcggttcacgcactcctcccgccactcaatatagctgtgcagcagcacttctgtatcagaggtcctctcaaaacggtggcccctcgcctgaagctccttccgcagttcctccgtgttatacagctcgccattataaatgatggtgtacgtctcctcttgatgcgtgcaggccatcggctggcggccgccttcaatgtcaacgaccgaaagtcttttatgtccgaataaaacatggggctctccccagacgtttgaatcatcaggccctcgttttgaaagagtgtctatcatattgttcataatatgtttctcttggacgagctgcttttgaaaatcgacccaacccgcaattccacacatgtgatatcagctccaatcccgtttctgtcggtatcaaattcgtttctatcagcactttacccagtttatgcaaagaaacgcagatagttgatttgtcccactaagagttgtatgagacaagcccgatttggaaagaacggaagagaagaaacaaacaaaggagaccggcacggttatgaaacgaaaacagcttttctcagaaaaaaacaaatgggggcgcggcaccctgatgatagaggacggcatctgcctcgtcgaaaacgatgaaggcgatatcctgcttgcagacagtctaggaaacgcagacgtattgatgaaacgcggcggcagatggcagccggcacggatttgcggcggtgcggccgaaatcggcgcagacaccatccccctgctcggcggggaagaaatccgttatgaaaagccggtcaaacggccgctgttaaccttgctcgattcgctggacgatgaaacgtttctgctgtttctcagccatcttcacgggttcggcctgtctgtatatgattgcgtattttcctacaatcaggcgctgttttccggtgaaggcgtttcgttttatcacttctcggcggatgacgcacaatgcgccctgcagcatcaccgcggcagctcgggtaaacacgacagatttgaatggacggcatctgacgggcggcgctccattatgtattcagcggcaaaacaagacggcaccgcataacaaacaggcggcacttttaaataggtgccgcctgatggatttagctttgtttttcacgctgattgacgcccggcgtttgcttttaccctttacagccgtagcttttgcggtaacgagagtgattgacgctggcacagttgcgcaaaatgtatgcgcaactaaaaaaacccggatgcatccgggtttttcaagcgactgattaaaatacgtgaaagccgatcggcaagtgaaggccgagcagcaccgtcaggacgagcacgataataaaaccgatccacagtccgccggttgatttgccttttttcttacggatgacgagcatttccatcagtccgatggtaatgatgccgagcagcatttttccggcgtattctccgttccaattcgcaaaacggacgaaaagctcagctccggtcagaataataataatgtagaataagcgcagaatcatatgcgtaatttttgcgcccttcgcttttccggcaccgtacagcccgtagctgacaaacaccaggataagcgcaacgacccatgaagtaatatgccaatgtgtcattatgttcaattccccctatcagatcaatctgcctcacttatggtaccacaacaagccgcccggagcattatcaatcgtgcgaaagacacacaattatccgatttggttcgacagcgtgccgatcggttcaattgtaatgtcaatgcggtcccccggctttaaaaatttcggcggcttaaacccttttccgacaccggacggcgtccccgtcgctataatgtcaccggcttcaagcgtcatcccttttgacagcgtctcgattaattcagctatcggaaaaatcatgtcgcccgttgatcctgattggcgcagttctccgttcacccgcgtttcaactttcaggctttgcggatcactgacggccgacttatgtacaatgaccgggcccatcgggcatgtcgtatccaggcttttgccgataaaaaactgtttatgttttttctgcagatcgcgcgctgttatatcatttacaattgtatagccgaatatatgatcaagcgcatgttctttggagatgtgcgatccgctttttgatatgattaccgcaagctccccttcataatcaagctgctccgttacgtccaagtggctgttcactgtttctccgtgtcctgtaacggcagcgggggctttcgtaaaaaccatgggatgctccggtatatcagcctcactccccatttcaacggcatgatcacgataatttttcccgatgcagatcacgttctttgaaggtctcggaataggcgcgcaaagctttacgtcagacagcgcatacataaatgaacccgactcgtcattcggttttttcgcccattccgcaagctgtccggcatgcgcgacaaacttatctcctttttgaatgcactcgatcagcgaacccggaatcgtctcaagttcaaacaattttttttcagccttttgcagatctaagattttgtcatcatcaatgatcagaccgacaaatgttcggctgttcagttcccctgtcgcaaatttcatgttaatcccccatcatttttaaatctggcattcctttatgtattcttcctccaggcgggaaattcctcttttaaacaggctgaaaataagtgtaaaagagtatcaaaaattgtcacttttttagtcatattgacgaaataaaaccttcttggacaaaatgggttatactattatcatcctatgttttccaaaataatcgagaattggagatcacacgatgaacaaaattgaagaaaaaagattaactttattcgagacagcgcaaaaattcggaatcaatgcgacggagaccatcaggtgcagccaggagctggacagccttttaaacgggtgccggggcgggctcatccaacaaacgaaagacagcgggctgaacccgtccgtacagattgagcacggccgcaccgcaggaaaaaaagaggctttctcataaacgtgatgtgtatataaatctgtatcatttatgtataaggcccggcatgcgtatagcgccggtgtttttacgtctaaagttttttccgctcacaaaaatgtgcatttgtcataagctattttaggcaggcagcccagataagctcctggagtgcagtcatgaaaatcttcacgaaaaggatgtgctcgtatgcccgcaattgtcggagcgtttaaaattaatgccgtcggtacgagcggagtcgttcatataggcgactgcatcaccatttctccaaaagcagaggttaagacatttgccggagcgggcagtttcaataccggagacaatctcacactgacgaattacagaaattcaacgaatgtgtacgataatgatgtaatcgatcagccgatggcaggaaacgcataaaggaggcgccgtatgaatttttacgtcaatcagtcgatccatatcaattacatgcgtgtagaatctgtcagcaattcctccatactgcaaatcggaagcgccggttcaattaaatctctttccaatctgtacaatacagggagttatgttgagccggcgccgcctgtcaccgcggggcagcagactgtaacaacagggggaggtcccggcacctcatcatttgtaccgctccagccgccaagccggtagttttaatgaaggaaacgagacgcgaggtgaatgtcatgtatgatcaatccgtttcatcctacctgcagaatttaaattctttcgtccagcagcaggcgcagcagattcaggagctcgaacggcagctgaaagaattccaaaatgaaatttcaacgctgaagcagcagccttctacaagaatcgatcggctcgagtataaatttgatcagctgaaaattgaacggctggaaggaacgctgaatatcggattgaatccgactgatccgaatgccgtgcaaaacttcgaagtcggccagacatctccgcaggtcggaatgatgcagcaggaacaggcgggccagcaaatgcagcaaatccgtcaaaacgtcgatatgtacctgaatgaagaaatccccgcgcttttagagaagctcgaaactcagtatgagagcaggctggacgaagcgaacaaatatcatattattgaagatatcagaaagcagatggacagccggattcagtattatctgtcccatgtcccgaaagaagaaaatacggcgcccgcgcaatatgccgagcagattgccgaacatgtgaagcgtgatattgtcagggccgtcgagcactttattaagcacatacctggtgaaatgaaaggtgatgatccgtcatgatttttacagtgattaaccggaatattgaagtcggcgacatccggtctaccggtgtatccagttcttccttattattaatcggcgacaccgattccgtctatctgtcttccatctttgacacgcctccggaatctcttattatcgggccttatgtgccgctggcgccggaataatgttaaagcgcatttcacgcctccggaacgccaaaatcaattcagtcggaattgcgagtgtctttcaagcaggcgatacgaatgaaatcaatatgcgggtcaaagtattggccgatcagcgtagtcttgctgtatacagagatgatgaaggctcatttaacaaaaaagaataccagatctttcggcagccggccgtcatgccgttaccggaaacgggagtccaaagcgcattctgccatgaaaacccttcaattcgggtaaggaatgtgaaagttcaaggggtatcgtcagcgtccgtggttcaaatcggatcgacgtcgatcgttctgggagattcgcggctgaaacatattaggcagatcttcacatcaagctcacaatcacagcagccctgacatataatgacggtgagacttctataaagggtgtcgtttatgccagcaattaccggacctatagctatcaattccatatcgggcggagtcgtaaactttggtgattccttttacctttctccaaaaagctcttctaaatctgcgctcggttcgggagcaggcaataccggagatttcctgttattaaacaacgttgtcaatgcgacaaactatatagaccccgatgtcagcgatcaaaatgtggtcggaaacgcctaaaaagcagccgctctttcagaagagggctgcttttggttcagcgttatgttcgttcatttgctttttttgtttttacaagcttttttggcggctgttttctgatccatttcacaaaccgcgcgagtttcgggtcacgccgcagctcttctattcccgcgagccttgccgcaagctcctgattcgtatagagcgcgtgaacctgtttatgacaagggatgcagagcattgcgatcggaaggaatgtcccgccttcttccttaggcgttaagtggtgctccgtcagccgcacatgatggcggccgcataattcacatgtgccctcggcagaatcggccataattccttctcctttctacatgatctccaatgtgacccgggtgcctttcccgcccggttcggacggatgaacgattaattttttcggcagacgcgctctcagctcctgcacatggctgatcactccgacggataagttgtccgattgcagcttttcgagcgctgtgacaacggtgtctaagagcccttggtcaagagtcccgaatccttcatctaagaaaaagaattgcagcgggtattgcccccgcagctgaatctgggcggacaaggcaagcgcaagcgacagcgatgtcagaaacgtctccccgccggaaaggcttgatacgggccgtttgacgcctccgttcgcatcatcacgcatgacgaaaccgccttctgaatcgactaatatggcataccgctgccttgtcagcgctccgagacgggcagaggcgtcccgagccacgctttccagctgttcttccgctaaaaattcgacgaatgtattgcctttacatacagactggagcttatcaagcctgtcaatctgtgtctgccagcttttcagttcggcttcaatctctttaaagcgcttatgctgtttttgcataaccgcgaaggcttttgcctgtgctcctttttcctccatggcggcgcctgactcagcctctgcctgcttcagcagagaaacggatgctgtccattcttcctctgatatccggcggtcggctaatttatcagtaacacggctgatatttgccgatagctgttttgaggtgtccaggaactcatcaatttcttttttcatttcctctgcacgcccttgcggaagcagactttttttgacttggtccggctcggtaaacccggtgtcttttgacctcacgcgccagtcgttttgcgctttctcaagggaggtctcagcatccctgagtgacatgagactcccggattcccggccttttgcgtcattcagtgattgctgcgcctgcttcagcgcgtcgaatagggactgctctttcgattttaacagctgtaattcctgccgcaccgcttcaagctttgcggaaattgatgtttcttcagctgctgttccgagctcttgttcatatccgtcaatcacctgctgcaggcgctccgacgcatagtgaagctcgagccgttcccgttcaagccgatgcttcatctcctgcaggcgttctttctcctcttcatgttccttgaggaatgcgatgcttgtttcaatgcgcttctcacattcttctgcctgcctgtccttctcatctatcgaagcctgccaggagtcaatccggtttggcggaatatcaccgcagacttcgttgtactgattcaatcggctttctgacagcgattcaagctcttctaatgaatgtctgagacggtcggcttctttttcctcgtagcggattcgttcggcaagctgctcagcttgtttcaccgtctgctgatgcgcgctgatcagtcttgtgaccttctcttttaccgacagcatatcctgtttcatttgtttccactccaagcggacggcgctgaacgcttcatcaagcgggcgtccgctgatggaggaagcggcttccagctccggaacccgggcgctttgcagaaacggacattcttcggtaaaacgccccgactgttcttctaatgcaaccttggctgtcagcacttcctgagaaagagccgccgcctcagaaagcagtgcttcaacctgctgcagctgttcctgtacagctgtatcaggcgagaatgtttcatgagcggaacgagggcggtcatgctgcgtcgagccgcatacaggacaaggctttccttcgattagtttttccgataattcttttgttaatgcagccgttctcgcttcctctgagcgcctgcggagatcggcttgcgttttgtcagcccgttcggctgcggctttcagtgaacgctccgtttcacagaccatatggtaaacggtttgaagcgtttgataagcgcgcgtaatgtcttcctcttccgttttcgctttcgctgtgagcgactcgctttctccgttcagcttctccacgtttttcagctgcgttgtcagattggcccgttctttcgtgatttgttcctgtgtctgctgaaagcccgccgccagctgtgctgcggtctggcattttttccgttcatcggcggtcacttgaactgctttcagctcttctttcagctcattctgcctgttttggccgcgggtcaggcggtctttcactccggccagctgtttcgaggcggcttcgtattcttcctcttttttgctgtgttccgcatttgttttttccgcttcttttttcgcttcaagcagtttttgttctatggctgaaagtctttgatacagctcttcttccttgacaagcttcggctcctgttcggccttatgggcccgccatgcttcataggcttcattttgccgggtaaatgaaacggtttccgcctctgatttccgtttggccagttcgtgctcctgttcggcgcgctgcttccggcggacggcttctgtgtagcggtctgcgtacggctcaagggcgagagctgtttcagcctctttaagacgctcagtcaaatccgtgatgtacgggcgtctttcctcaagctttttctcccggcgctcatattcatctctttctgtctgcaggttccaaatttcctggtgattctcaaaacgctcttttgcccggacccgtttcttctcagctgcttcaagccgttcgttcgcttcgtgaaactgctgttcagcctgcttcagcgcatcttctcctgcgtctccgaggccggattgttcggccagcatttcattttttttcgctgccgcttcctgcgcccgccgccgcaattttttgacaagcctgtccccgtactgttccagattaaacaggcgctggagcatatgtcttctttccgcgcctttaagcgacagaaactcggcaaactttccttgcggcagcacgacggctcttgtaaagtcgtcaatggtcaggccaagaagctcctctacctttttgttcacttcattcgctttatcggccagcaccgtttgttcgtctttgatttcaatcaggcggcagagggcggtttttactttcgtttcatccgttctcttaaaaacgcgctcgaccttgtaggaaacccggtggccggattgaagcgcgaatgtaaatgagacggcgagctgatcttcggcatgattcaggattccgtgtgtattatttgcggcgcgctccacttttccgtataaagcgagtgtcatggcatcaaggatcgacgattttccgcttccggtcggcccgaaaatcccgaacaccccggctcctgacagtccggcaaaatcaatggtctgttcctccctgaagctgtggagcccttttatcgttaacagaatcggcttcatgtcgcatcctcctcatcatctgctgacgcaagctctaaaaacagcttgaccatctcctcatccggcacgccgccgcccgtttgtttttcataaaacttcttaaatcgatcctcaattgatgtgtgtttcacttcaatccggtcattttcggtctctttttcttcaaaaaccggcctgatatggataaagccgggatgcgcctttctcagccgatgaatttcctcgagagaaagctgatccgtcaaatggatatcaaggtcgatccaggcattccggtcacgcccttcatcgagccagccgtgaacctcgctcagcccctgcgctttccatttgacgagcggtttaccggaagacaggaaaacctcttcccacttcgcttctccgccgggcttcgcttctaccaccgtcaccgatttggcataaccggcttctgaaaagctgtatgcgagcggagagcctgaataacgggcagccgtcttggcgcgcttgatcgtttgcggacggtggagatggccgagagccacgtaagccgcatcagccggcaggctgtcagcggcaactgtgtaagcgcccccgacttcaatcggacgctctgaatcggtctgatttccccccgcgacataaatgtggctcgccgcaattttcacggcatcgtcccggcacagtccgcacatgtgagcaaacgcctctctgattttgacatcgtaatgatcgcgaagaagcttttcctcaaacgtatcagaaagcacttcgtttaatctcgcctctgacggatatgccagcgcggctacggctaacagctcgtccgccgacggcacctcaatatgcacgggttctgtccgcggatagccgattaaatgaatgccgcgctcatttgttaacggagaagccgccgccagcctgtcgggattgtcatggtttccggcaatgacgacgaccggtcgttttccgccgtcagaaagcgcggaaagactttcataatacaattgttcagcgagcgcaggcgggttgaccgtatcaaatacatcccccgccataatgaccgcatcaatgttttcttccttgacaatggtattcagctcttccaatacctcggcctgctcgctcagccggcttctgccttccagcgttttgccgaggtgccagtcagctgtatgtaaaatgcgcataccgcattcacctcactttttgatagaaaaaaagatccgctccaaaaaggagcttcggatcttgttacagtgtaagaacgtgacctccatcgaagaaatagagcgcacgccctttcactttcgtttttgtaatttgttcaaccgcttttgtatacaattcgatttgtgtttcataccttttttgcagaatcggagccgcgccttcaaatccgttccggaatttcccctctatccgatctgttttatagtccagcaaatagaggccgtccgccgtttcgtagaggcagtcaataatcccctgcacgagcagcggttcaccggccgtttcggcatccttgtacacctcgccggccggaagcgccatactgaacggcacttcccggtcaatccgcagcgccccgagaaggtctttcccgatttcagttccgaaaaactggacaatttcttctatatcaatagcttcctgctgttcttctgtcagcagctctttttcgtaaagcatccggaccgtccgctccgcttcttcggcagtcggaacgtgcgtcagcggtatgtgctgcatcaccgtatgcatcgccgtccctttttcggcggctgtcagcccttttttcatcataaaaccgggacgcctgtataaaagcgtgtctcctgacggtttgatgagagagcggccgctgtattcatcctcgtattcttgctttctcttcagctcagaaactgactgcttcgttctgatagccgtcagctctcggtacggatattcccattcaagcagacggcgcgcctgatcatcaaatgaaaacgaatcaggaatcggctcgccctgctgaatcgctttgagacgtttgctcttttcttcagcacgttctttcggattctcttccagcaattcactttgctgcagcatccggatgtgaaaacgcgacgggtcgcgcgcgatatcctcagatgaggaaagtcccggcgtcctgtgcgcctccatgtcacggtggcggatgagcgccggcccgataaagtccaaataagatgacgcctgatagcggtcgaattcagaaagaagccaatcgggccggtctgcttgcgcctgccatttggccagctgtttttcccggtttttgcaggaaccgacgagaaacagcttttccttcgctctggtcagcgccacatacaatacgcgcaattcttcggataagagctctctgcgcatctttttcttcatcgccacaagcggaagagtcggatagctgattctgagttccggatgaatatacttcgtgccgaaaccgagctctttatcaagcaggtatgatttgttgagatccatcatattaaaacttctgccgagtccggcggtgaaaacgacggggaattcaagtcctttgctgctgtggatcgtcatcagccgaacgacatcctcctgctcgctgagcgcccgggccgtccccaaatcatcgccgcgctcctgcatccgttcaatgaaccgcaaaaagcggaataacccgcggaacgccgtcgcttcgtacgagcgcgcccggtcatacaagacgcgcagattggcctggcgctgctttccgccaggcatgccgcctgcatagtcaaaatatccggtatcgcggtatacttcccaaatcagctcagacaccgaatgattcgtcgaaaatgaccgccacttttgcagactgtcataaaaggttctcagtttttgatacagttcatcatgtctgtcagcgttcgctatatatgctttcagcgcttcataaaacggcgcttttttcttttcaagacgtatcagcgcaagttcattttcgtcacagccgacgatgggcgagcgcagcacggaagcaagcggaatatcctgatacggattatcaatcaccttcaagactgaaagcgccgcagccacctccacggcttcaaagtaacccgacgtcaaattggcgtacaccggaatgccctggtttttcagctcttccattaattgcggcgcccacggcatggagcgcagcaaaattacgatatcccggtactggatattccggtgtgtttttgttttgccgtcatataccttaaacggagatgagacaagctttcggatctccccggctatcgctttcgcttcccaatgcacggtttcaaagtcttcggcatcctcggagctgtctgcgccatcagcgctgtcaatgagcagcagttccgtttttgccgcgtcattcggcggatacgatgcgccgatcttcaatgccgcctgttcatcgtaatccacttcgccgatttttccgcccatcagctgcttaaacaagaaattcgtactgtccaaaatatcggagcggctgcggaaattttggttcaggtcaattttctgccccgtgcctgccccgttttctgtaaaccttttatatttcccgagaaacagcagcggctcagcaagtctgaaacggtagatcgattgtttgacgtcgcctaccataaacagatttcccgcctcttcattcccgcttttaacaagctgcaggatagactcttgcacaagattcgtatcttgatattcatcaaccagaacttcatggaactggtcttgataataaacggccgcttcgctcggcacccgccggccttcttcatcaaccgcagttaaaatcgccaggcagtaatgttccaaatctgagaaatcaataattgatttttcttgtttcgccgcttcaaatcgttttccgtatgatatcacgagctgaacgagcgtttcgatgacaggcttcatatcttttaaactctttaagtgatcttgcggacttcttgtaaagtaatcggtctttaccttttcgatcagtttcttcgcgccgtttcgcaaatcggtcgcttcgtccaaaagcgctttgtcaaattcatcgccctttaccgccttcgcccgcttaaaggagactgcgggaacccgttcatacagcgcatcgaagtcatgccggcagctgatcagctcttctatctgctgaaggtcatccagaaaattatcagcgcgcggggccggcccgccgggcgcttttgtcagttcaagcgccttctcaagcttttgttttgccccgaagagcgccatttcagcatcttctttcacatactggtaaaacggaagctcttccattttgctttcttccgtcacgtcatacaggcggacaaagctttgcagccacgcttccgggtcaggatgcgaccgggaatactcgtacacccgtttgacaaggtcttgaagatcaagatcatgcctgtctgtcgtatatctgtccgcaagctcaaaaaacgcctgattcccttttgcgtattcatcttcaaacagctcatcaagcacttcgtctccgagcaattcgccttccgtctggtcagccatccgaaaaccggggtcaagatcaatcatataataatattttttaagcacttgcagacagaaagagtgaagcgtcgaaatgctcgcccgatttaatagagagagctgccgtctgatatgcagagatcccggatttttggcgagctctttttctaatgcttccgcgatccgatgcttcatctccgctgctgaggcgtttgtaaaggtcaccacaaggagccggtcaacatcaaccggatcttcctccgcggttatctttctgatcatccgttccacgagcacggccgttttacctgatccggctgcggcagcgaccaaaatatcgcggccggaagaaacgatggcgctccattggtcatccgtccatatgctgtctttcggtttaggaatttgcatcatcatccgcctccttcttcagccaatccagtatggtgccgtctttttccgctttcaggctgcggtattcattttccttaagtgactcatcaaactggcataccgacttaaacgcacagtacgtacaaggcgtcttatctttcagcttatacggggtaatggacacaagcccgtccgttatcgcttcgccagcctgttcaaatgtccgccgcacatggtctgtcagcagatgaaagtcctgttcgctgaccgcggctgagtcggatcttaaagacccgtcctttttcaaaccggcattgatgatatttgaacgcccttcctccaaagtcgtgtccatcagactgatcgcctcccggtcaccgaggagaaggcctttcattttaaatttcttgaaaatttcctgctcgatttcatcaagccccatcggcagactggcctgaatcatcggatcgtgaatatggaaatacaaaacgcctgccggtgtcgctttcatgccgagccaatccgcggaatgtgtaatcgataagtcaagatatgtgagcatttgcagagcgagcccgtaatacacctcagccagatcaagccccctgtcgcttgatttataatcaacgattctcagcagcaggccttttgaactttccgctttatccacgcggtcgatccgtccgacgagttccatcgtacagccgtttttcagcgtgaaagtgagcggaggcagcggcccgcttccgccgaaaccgagttcaagaccgaccgggacgaaaccgctcgccttcgcatgctcgcttaatatgcctgaaacacgcgtgacgatcttctgcagtttttccttcacataaaagtgtctgtttgagctgagcagaatctctttttgcagctttggcgcaagccgttccaccgcttcataggagaaattccggcattgatctttcgtcagatcgcgccattccagcttctgctcacgaagccggtctgaaatcagcttcaggctggagtgaaacagctggccgatatccggcgcgtccagcttgaaaaactgccgctcttttaattgaagcccgtgagatgcaaaatgagaaaactggcaggcattaaacgcctccatccgggagacgcttcctttaatatgctcgccgtaaagctggcgcgaaacaggccgttcaagacgcttcgcctcattgcggaaaaacaagcttgaaaacagctttttcgcacgccggtgatcagactctttcatcagcacattgtatgcgctccaccatacgtcactgatctcgtactctcttgtccacagcctgagctgacttgccgtatatgtctgagccacctgtttattgacgagatactgaagctgctcttcttcgcttacctgctcgggatcagccgctgacagcttttcctgatgatcgggaaacagctcgccaagccggtttacaacgattgacggcaggagcgtttttccttccgcatcagcaatcgggtatgacacataaagacggtcagacggactcgacagcgccatatagatgagaaaatgctcatcaagcagccgctcacgccccgcggaagacagctccactccgactgctttcagccactcccggtcatcatcagacagcacgccgttttcatccgggcgcgccggaagaacgccgtcattgaccccgatgacgaatgtgcaggacgtgccgtacattcttgagaggtccatattccctacaaatacttggtcaagcgcaggcggaattaaagaaaaatgaagcgattccgttcccgtttcaagcatttgctggaacagtgccaaagatatttcatcttcacccatcatgccggcaaactcctcgagaagctggataacggcatcccacgcctggccgtgctgctgcgcatcgatcatgtttccggtctcttcggcccgctgccttttccggtccagcttcaggggaacatcggtatcttccaaaaagagataaagagcctccgccatgctttgaaccgttttcgcttttttcatccggttttgaagccggacaaggggcgcggctatccactctctcgtctcgttcagcatgtgttccatctctatttcctgatccgtctgcgcgaaatcctcatcgagcgatacgaagcgcctgtatacaaaccgctcgccgctcgtccagcgctcccctttaatgccgtaggcgatacagtaattttcaagctgatcgacctgctctcttattttctgctccggctgatcaagcgggaataacagttcggttttcgcacagcggaacaccgcttcatatctccagttccccttcacgacatccaggcttgaacggatgaattcaataagcgggtgatgctgcatagaagcttttccgtcaataaaataaggaagcccgtaatcggcaaacacttccttcagcaaatctttataatcttccggctgacggatgagaatcgccatatctttgtaccggtatcctccgtcccggacaagtgattgaatttcccgggcaataccttcaagctcagctcttctgttttgcgcctgcatgacggtaaaagcttcctgtccgccggtatacgccgcggcgggacgcacatcgtactgcgactctatacaggcaagctccggcgcatgctgatgccgcttcgtgccatgcagttccttgcaggaaatatcggcattcaattcctttgccgtctgataaagcttatagtatgtgcttcccgtcattctgaacagatcgagctcatccggtgcctgttccgccgaagggctgtccgccgtcagcgagaatgtgacatgttcagcatgcatgatcagctgctccagcacccttaattcctgcggcgtaaattgatagaatccgtcgacgtaaacacgggcgccttttacaacgtccgccaaaggaatctgctgagcgagcagcgtcaaataatcctctgaatgcaaatagtgtccggcgaggcttctttccatctgctgatataaaatgcctaaatcatgaagtttttcagacagcatccgctctccgcgatattctgacgccgttccgctttccgccatgcggcggacgtcttcaggctcaatacagtaccgcttaaactctgtcagcatccgttccacctgctcagtgaacccggttttgtcactcgctttttgatacactttaaactcgtgcttatgttcttcaatcaatttccttaaaagcatctgcacacccgtcgtcgtcacaaacgggcggttcatgcccccggtatgctgaagcacgcgccacgccaaacgcgaaaaactgaacacttgagcgcgtatcatgccgccgatatccggcgttttagcaagctcatattccattaaaaacgtcatttgatccgggactagaaaaatgatcggtttcccgaacggctcccggcgcagttcatcttgaatgctgtcgataatcagcctcgttttcccactccccgatctgcctactaaaaactcaacacccaattagaagacccctctctttttatctttctacattttatcgaaagttgacgaaaatgaccaatctcatctgctggtaaaaacgggatgactgttttaaaacatatcgtttttgaccaaaataaagaaaaaaggactaatgatgatgtcagaatatcccgaagtaattgtacggacggctctgtcgttcagcattctgtttatcggcgcccggatactcggtaaacaaaccatttcacagatgacgctttttgatttcattgcggccatctcgctcggcgccatcacggcaaatctgtcgtttaatacaaagctgccgattcattatcatgtcattgcctacattattttcgtggcaatcatttaccttgtcgcatatctttctatgaaaaacagggcccttaggggtttctttgcaggcaaaaccgaccattatcattcaaaacggtaaaatacttgagcataatatgaaaacgatgcgttataccatcgactacttgaaccagcagctgcgtgtaaatgacgtatttgacatttctcaggttcagactgccatcattgaaacaaacggcagcatgtcagtggaggtcaaaccggaatttgcgcccgttacaagaaaggatctcggcatctttgccggacatgaaaagaactttgccgttgagctgattatggacggccggctggtgatgaataatctggaagaaaaccacgtatcggaaaaatggctgagagaagaattggacaagagaaacctcaaaccggaagacgtcgtatacgctgtgcgcggaagcaacggccggctttttgtcgacacttacgacgaccatattacatcgccgctggatcaagaataaaaatgacatccgcacatgtcacgggctgccgccgtataataccctataaacattcgggggtgagtccaatgcacgagaatttttttcattatacagccatctgcagtgacgattctgtgcttataaaggatctggtaaaatccataaacggtgaatacagcgctgtgatttgctactcaatattagccgaaaaagcgccgaccgcagaaatcagaagacgaatcgaacatatcagagaggaagaagtgcgccacctgcacgctttctcttcattgtatacgtcaattaccggaaaacagttgacgccgaaacagacggagcattgtccgcacacatacagagaaggactgagggcggcgttttatgatgagcagaaaacgaatgatttttatttgcaggcatccgatagagcggtgcatccggaagcgaagcggttatttgcccgcacggcatttgacgagcagcgtcatgccgtctggtttttatacgatatggcccactctcctttccaccatacagggggaacggtatcaaacgcgccgaacacaagctacaccgaggtaaataacggcaaataacggttcaggcagatcacgctcccccgccgggagtcttcagaccgctgacaaaccccgttctttcaacatgagagaatggggtttacttttcgagcagttttatactccctctaaacaatggataccttcttcattgtataatcagcaaaaaccctttataataaaataaaccaactggtcggtttttaaggggccgaacctcatttggcggaaaggatctgtgtgaagtgacaaatacaaaaggcggtgccggaaagagcgaaaagacgaagaacaggctcgtatccgcttcgcgtgacttatttgcaaaaaaaggatattcagaaacatcgattcgggatattttagaggcggccgaaatcagtaaaggcaatctatatcaccattttaaaggaaaagagtttctgtttcttcatatcatggaagaggatcaccgcgtgatgatcgagacgtggagggaaatggaagctgatctgaaagatgctgccgaaaagctggcgggctttgcggagctgctcagccggatgagcatcaattacccgcttatgagagcaagtgaagagttttatgcgagtgcgtttacgtcagaggaggtcgtaaaacggctcaacaaaattgatattgaatatgacgatgtgatgagagagatcttagaagagggaaatcaagacggcagctggtccattcatcatgtcgaatcaaaagtgaaaatcctgctatccgtcttctacggtttagatgtgttatataaaaacgataccattcagcaaagaatcgaattgcaaaaagaagccatctccgtgtttattcacgggtcgatcagcgctgataaacagaatgacagctgacaaaggagaaacaacatgcaaaaaccgatcagagaacaaaaggctgtactcatcatcttattaagcaatatatttattgcgtttttaggcatcggattgatcattcccgttatgccgctgtttatgaatgtgatgcacttgacgggcagcacaatgggataccttgtcgctgccttcgccgttgcgcaattaattgcatcccccattgcggggagatgggttgaccgcttcggcagaaaaatcatgattctcgccggactgtttttgttcgcattatccgaactgaccttcggattgggcacacatgtctccattttatatttcgcaagggtgctggggggcatcagtgccgcttttatcatgcccgctgttacagcgtatgtcgcagatattacgacggtgcaggaaagatcgaaggcgatgggctatgtatctgccgccatcagcacagggtttatcatcgggcccggcataggaggatttattgccgatcacggcgttcgtatgccgtttttctttgcggcgggaattgcatttatcgcagtgatttcctctgtctttatgctgaaagagccgttaactaaagaagaacgcgcaaagcagatggaaagcgtcaaagaatcaactttcttaaaagatttgaaaaagtcgattcatccaaactacttgattgcctttatcatcgtttttgttttggcattcggactgtcggcgtacgaaacggtattcagcttatttacaaaccataaattcggcttcacgccaaaggatatcgccattattattacgttcagctccatcgtggcggtcctcattcaagtactcgcgttcggcagacttgtcaacttcctcggggagaaaaaagtcattcagctttgtctgatcatcggcgctgtgctggctttcgtttctacggtgatgtcaggatttttgcccgtgctcgctgtcacctgcatcattttccttgcgtttgatttactgcgcccggcactgactacttatttatcgaaaatcgcaggaaatcagcaggggtttgttgccggtatgaactcaacatacacgagtttgggcaccattttcggcccggctctgggcggtattttatttgatatgaatattcacttcccgtttctgttcgcaggtgtggttttatttctcggtctgggattgacctttgtgtggaaaggaaaagcgggcgaggtttcggagtagggtgcactcacccatctccggagctttttttgcgtttgcgataagaaaaatgaatggattatgagaaataattcattatttatttatctcaaaatctatactatagtaatagtaaggttaacgagcttaacaatttaatatgaatgtttcaggaagaagggttttcattgaagaaagacaaacatctccttacggatatctggtttattctcatcagtgcggcaggggggtttcttctttcgcttacagggatgtcgatcgcctggatgctcggaacgctggccgccggctgcatcctctccatgacgaggccccgctggctgttcatggcgcctgacagaagagggattcaccgcagatggcttgccgcgggacaaatgatcctcggcatcgaactcggccagaaactgaacctgtccgttctgtcggttttacgggagcattggcttccggtaggcttcatgctgattttttctatcgtgatggcgcttgtttccggatatgtgctctttcggttcagccggacggacatgatgacaagctttgtaggcacggcgccgggcggtttatctgccatgccgggtatcgcccaggaagtcggcgcaaacaccgcgattgtaagccttattcagctgacgcgcgtccttttggtcgtcatgacaataccgtttctcgtcattttcttatttaccaaacaaaacggtgcagctcagacatcagccggagccgtttcagcaggagcttcacatccgggccttactcccgtcttgttaacggccggatttattttggctgcctggcttgcaagcaaaggcgcaaaacggctgaaatttcccgccccttggctgctcggcagcatgatcggcgttgctgctgcggaaatcggcgtgtccgccttagcgggcaaagacatgctggcctggtggccgccggaagcgaaccagctgtcacaaatttttctcggcgccacaatcggatcaaaaatgtacaaaagcatgttcaccggcgtgacgagagtgctgaccgtcggatttatttcttccgtcggattaatcgccgccatgattctgagcgcgattgcggtttctaaattaacgggcatctccatgattacatctgttctcgccttttctcccggcgggatcgccgagatggcggcgacttcgatcaccctgcacgaagactcgactttcgtcgtcgcggttcaggtcatccggatcgttctcgtcatcgccatgcttccgcccttctatcggctgctgcaccacctttctcagctgaaacgggcacacggtgaaagaggccgggcagaaagaggaacatgatccgaataaaaaaacacgcatccatatgcgtgttttttatttgaacagctctccgccgccatttacagaccgccagtttgctgaaagatcacggaacagccgttcagcaaataacagttcttcatctgtatagcggtctaaaaacgccaagagccgcttttttatcaattcatgatattcatgatgaagagaatgcagctctttcccggcaggagtcagccggaaatagacttcttttttattgtcgctcagccgggtcctgcgcagaaagccggcttccaaaaacttcgcgcagcttctcgacacggtcggctttgtcgtcttcattttttccgctattgacgtgacattgatcggttcatgatctccgatacacgacaaaatgtgaatttccgtcaaagtcaactgtaatttttttccgtttccttcacggagttcgtccatccgtccggccaacgacgccctgatgtcctcctgacacctctcctgctcgtgaaaaatatctgtcagcccttcaagaatcatgtgttttgcatggtctggctgtcttctgtccaactgctgaatcacccttccgtattgattgtttcttttactataacgttttgttacacaagaaacaatcacacaggcgcataaaagggtatcagatgaatccccatctctccaaaccggccagaacagcttcttccgcttcacgtcccgagccgccggctgcccatgccgcgtggccgtccggccggatgaaaacggtgtggacgtcatcccaatcggcacgtgtttcagcaagctccgccctgacagctgccacgctgtccgtatcaataccggcgggaaggctccctcttaatgacaaaagcacaaaggcgcccttatgaagaaaatcatacagccgggccggccgcccgtcatgaagggtcaattcgatatccggcaggcgttttccgttcaggatatgcggcggcagctccgcatccggttcataatgcagatcaagcgcggatacttttcccgccaataaacggttggactcctgaaaatccagcaaagcggccatcgtttctcttaatgccatccccgactcggtaaaatccatgagctttatctgggttcttatattgtgcaacacttcttttcctgtgctgtgcctttcctgatgatagctgtccagaagataaggcgccgctttccccttcatttgcgccgccagcttccagccgaggttgaaggcatcctgaagccccgtgttcagcccttggccgcctgcgggaaaatgaatgtgcgccgcatccccggccacaaaaacccggccggagcggtactgctcagcctgacgctcggcattgccgaaccgcgacatccataccggatcactcaatccgaaatcagtgccgcatatccgccgcaggtcttctttcagctcattttcagtgaccggctcttccttccgcttttgcggagcgtgcggagaaacgatgaggatgcggaaaagtccgtccgtaagagggacaatcacaaccgatccctccaggcggcacgttgacaaaaaggaagattcgggcggatgtttcaaagcggcatcacagagggttcctgttaagtcggcatcagtgcccgaaaaagcgatgcccgcctgtttcctgacaatgctccccgctccgtctgtacccgcggcatataaactgtgaagagtgcggatcccgctttcgtcccggaacaccgtctccactccgtcatccgtctgggtgacagccaccgcttccgccccgcggatgatgtctgcgccgagacttgatgcatactcctccaaaatccgctccgtttctgcctgaggcagcattaacgaataattctgcttcgtatccagccgagaaaaatccagccgtgtatccagcatggaaaaatggccggaagacaccttcgtccctttttccaaaaagcgttccaatatgcctctcatggcaaaaagctcaagtgtgcgcggatgcatgataagcgctttggaatatggcaccgtcttcttcaatcgttcaataacagtcgttttcactccggccagcgccagttctgatgcaagcataagcccgaccggacctcccccgataatggcagcctgtgttttcatctcatcagccctctttcatattttttgttacacacgtaacaaaataaccaaaaaataaaacgccttctttttgtttcacacgtaacaattttcattatagtctttcctctgcttttttacaatcatttccgaaaaaaaagacgccgtttacctggcgtctgattcactgatgactccgacaatgtctttatccttaatcggaccgaaatgacggctgtcgaggctgtatatgcggttgtcgccaataacaaagtattgtcccttcggtatgcttttgcgcccggtcgtttccttcagcgtataatcaccggtcacatggctcccggcggacaatgatgactttaacggttttaaaaacggttccgccacccgttttccattcacatacagctgatcctccctgtatgcgattgactcgccggggagcccgatgacacgtttgatcagcactttgcggtgcgggcctttgaacaggacaatatcgaaacggcggatcgttttgtaacgatgggaaaacttgttgaccatcagctcatttccttgtttaaaggtcggattcatgctgattccttcgactttataatcaataaaaatggcattctttaattgtatggccaaaacaacgataagcacgccggctataaaccaaaatcgttttttcaagattcctgtctccctccgtctttctcatgctgactgattctcatctgtaaacgccgttcgatatgcttcccggcataccacagcaccgcgatcaccattatggcgcccgccatcctgaaaggctgtgtcatgagtgcgtgaagatcatatccgataaagctgatcataaaaatcatgaccattttccccatagcggctgctgatataaactgcagcgccccgacccgtgacaggccggcaacgatatgaaccgcagcggacggcgtaaaggggaagcaaagcaaaataaacagcggaccgaaaccgtgccgctcaacccagagcatcatccgccttatggtctgatgcctgcggatgaaaccgaaagctcttttctgtccgaaacggcggacggcataaaacatcagcatcgatcctgccgcagatccgagccacgacagaaaaaaaccttcccataacccaaatgcattcgtattcgccaccacaaatacaacaaggggcaaaaacggaagaaacgcttcaataaaaggcagtgcaaccgcagccgccgggccgaaagctctatagctttggaaccattccgtcagctgttcctcagtcaaatatgataaaaattgctccaacgtttatactccttaacgagtttgtctatccttattctacacattatctccaaaaaacgaaaatgtttacgagattttccgacttgaaatatcgtgtaagcgagtataaaataagaacaaacgttctcttttttaagaaagaaggagtatttatgcctgacatccggagcggcacccgcgatctcatcgaaaaagggctgtttctgcccatggcggctgccatcctgaaccgggacctcgaagcgcttgattcgtgcccgttcaaattaaaacaaccctataaacagcttatcagctgctctttaaaattagcacaaaaggatttgagtgatgttcgaaaagagttaagaaagcgtaaaattaaaatatacgaagcggaaagagacgaagcatttacgctttatatatgcaccattaacggctatgaagaaaaacaccgttatttcaacccgagaatacgggaacaggtaaccgccttattagaatattacctgtctcttgcgaccatttaaaaagcagccgggactgcttttccttttcaactgataaatttcagactattcacactatacattcgacatgattttctttataatcgggacacgctgttttcaatgaaaaggaggaatgttatgaaactgattcatgttctcgccgccctgccctttttcggaattctcgccggcattccatttgccaaccgggtgacgccttatgttttcggaatgcctttcattctcgcgtatgtcgtcatctgggcggtgctgacttccgttctgatggccgccgtttacaaattggacaaagaaaacaaggcgggtgaggcggaatgaacgcagcatttcccgtaatggccgccgtgctcctgttttgtgtgtatctcggaatccgggcccgaaaaggaaaacatatggaccttgaacaatggacagtgggcggacgcggcttcggcacgatgtttgtctttttattaatggcgggagaaatatacacgacctttacattcctcggcggaagcggatgggcttacggaaaaggaggccccgccttttatattatcgcgtacggctgccttgcctacattttgtcatattggcttctgccagccgtgtggaattacgccaaacaacacaaactgatgtcgcaatcagatttttttatttcaaaatacaacagcccgctcctcggcattctcgtatcgctcgtcggcatcgcatccctcatcccctatctcgtcctgcagctgaaagggctcggattaattgtttcagcaacgtcatacggacagattccgccctcagccgctgtctggatcggcgctgtctccatcacgatttatgtgatgatatcaggaatccacggttcagcgtggatatcagtcgttaaagatatcatgattttaggcatcgtcctgtatttaggcatttatctgcccattcattactatggcggatttacggagatgttcaaacaaattgacgccgcaaaacccggttttctcacgctgccggaaaccggacagagcgtttcctggttcagctcaacggttttgctgaccgccctcggcttttatatgtggccccatacatttgccgcttcctattcggcggagcatccgcgggtgtttcggaaaaacgcgatcatcatgcctctttatcagctcgtcctgctgtttgtcatctttaccggatttgcggcgattctgcaggtgcccggtttaaaaggggcggacacggatctcgccttattaaagctgtctgtgaaaacctttgatccctggtttgtcggactgatcggatcggcgggcattctgacggcgcttgtacccggttcaatgatattaatggcctcaagcacgctgttcgccaaaaatgtgtacaaagccattctgcccggcacgactgacgaaaaagtctcacggctcgcgaaatacaccgtacccgtcatcgcgctgatatccgtatattttacgctgaaaggcggaaataccatcgtcaccttgcttttaatgggctacagccttgtcacccagcttttccccgccctcttattcagcctgccgaagcggcgttttatcacaagccacggcgcttttgccggcataacggccggggtcggaacggtggccttcattacgctgaccgaatcaaccatcggaaccctctttccgtttcttccgcagatcgttaaagatatgaatacaggcatcatcgcactggttctgaacattgtcgtcatgtttgcagtcagcgccgcagtcagaaaaaaacaaatcagcgcagccgaaaaggcggcttaaatggtaagatagcggtaagatacacgaaaggggaaaaacgcatgatcatgacaacgaccgaaactgtcgccggaaaacagattacggaagtgaaaggcttggtgacaagcagtatcgtccagtcccgtcacatcggcaaagacttgcttgcaggcttaaaatctgtcgtcggcggtgaattaaaaagctatactgaaatgctggaagactccaaaaaagcggtgaaagagcggctgatcagagaggcggagcagctcggagcgaacgccatcgtcggcctgcggttcgaactgaccgcaggacagaacacatccgaattaatcggatacggaaccgccgtcaccgccgaatccatttaaaaaaacaagcctctttaaagaggcttgtttttttatttctcacatgcgatatagtctttatctcggtcaagtcttttatttgcattgtaaagcgcttttgatacatacggcttgtactttgttctaccgcccttgtttttcactttcgacgatttggccacgccacccttatacaccttgttcagcgccttgcagttttgatacgtttttacctttgttttcgcttctgccgtctgccccgctccgtatgaacaaccgaacaccagaccgaaagacaaaagcacagctgccgtctttttcatttctatcctatcccctctcctaagttatgcggtattgctgaacatatcataattcaaataatctccatttacaagagaaataggaagatagttttaatttacgtccgctcgtatatcttttatggaatttttcccaaaaccttttataatatgaattgatagcgctatctgactatgatgataggaggagaaatgatgatgaaaaaagggcttgttgcgggtgtgctcactacagccgttctattcggcacatgtacggcggaaattccgggggtgatcagccccaatacggcggaagcggcgtcccagctcagcaaaggaatcggcggaagggcctacctgaatagcacgggttctgtactcgtcacgaaaattcagcttccaagctcaattcaggtgtcaaatgggacagcctatatttactcaggatttaccggaggcacagaggctgatatcggacttcagtacagtgacacctatcatgtatggaaaccgatcatgaaagtcggttcaaagggacaaggccaggtccggtatctggaaggagaaagccaattcacctatacgaaaggcttccggcccggcagcaccgtacagctgaccatctacaaaaatctgaacggcaatacccgcgccacatactggggcacgaataatgacggatacaccggccgcatcatctcagaactcgcccaaacaaatgtaggctctgtctcaaaatggaaagcgctcgccaccgtcgcggtcacatcagaggatcagcgcccttacatcaaatcaaacttctcaacagcctttacgaacatcacgattgacaataaagcagtcacacctgtgattgatacacaggattttgccaaattgacagtgtcaggcagcagcgtcagcatgtctgtcgtcaaataaagaattccgaacgcacgatttctgacatcgtgcgtttcgtgagggtctgccggatacgcaaatcccttatttttcggattacgtttaataaacaaactctgttacattcaaaatgtcgatttctatataacaattagaggaacctcatttgttgaggttccccgttattctccaactcacgcaccggttaacttcacatactgtcagccggctcagggctgtccaattttagttagaatatagctttaacaggtcttgtgctggaaaacgatctgcatcgttcgcctcaacaaaatatgccaactgccatttttgtgtttcgatagcttgtttgctagtgggattttcccattcagggtaaactctaattgccatttttccttttgtagcggctgttttaaggatattttgctttacaagaacttcttttggaaaaacaaattgtccaaaatgatgattactggcaaaagtattgataaccaataaatcagcagctttttcatatgaaaaggcttggtttttaccatctccatctttttcccaaaaagcaacaaactgtcctatcttgttaggcgttatttttgcgactctgaatcgaactgattttgaatgcagttgaaacctaccggccccatactctgagttttgagcttcttcttgaatatcatgtatcgttaagtgatttggttcataaaaaattttatttacatgtgttaacgccttataaaattcattcactgcttcgtactccttattttttatagtacgtcatccattgcttcttgattaaaatgggctgatcatgtgtttccaataaaaaaacagccctcctcagggttgtttttttaacatttctttcattatttccgccaaaatgctgagcagtccgccttatcctgaatattgaattgaatcatgcgttcaagcagctcataatgcaccggttcagtccattgaattctgaacaaacgggaagtggcgctgtagccggcacaggcaatgtcgtcggcaaaatgcgcaattcccgcttcttcgggggaaacacttacatgatgctttgctgccgcaaagccgataataaaggtgccgtgatcggtaaacattggcgtgttccacttgatctgcgcttctaagttcggaaattggtcagccgtccacgagaggatttcctccattcgcagacgatgatcagggctgtcgatacttgataaacagtctttgaaaacgtccatgtctgcctccttcaacatcacgtccgctagcgccaaaaccccggattttcagctttttccttgatgttaaattcgatgatcttcttaagcagatcatagtgcaccggatcagtccatcgaattcggaacaggcgcgaagaagcgctgtacccggcttgagcgatgtcatcggcaaaatgctccatcgtctctttttcaggtaaaatgctcaaatgattttttgccgcggcaaacataatgatataggtgccgtgatcggtaaatgtcggtttgttccacttgatctgcgcttctaagttcggaaattggccagccgtccacgacaaaatttcctctgctttgagacggtgatccgggttatcgattcctgatacatattttgcaaacacatccatgcccatctctcctaaaatgaaatatcattactctttacatcatcatagccaacagacggacacgatacaactctggtcaggcatgtaaatcgaaaaaagccctccccaaaggagaggacccgtcccttcacatcacagctttctctaatatctctcccccagctcccgcaaaataaagtcgtagatcattcttgtccgctcttctttcggatacagcatgaattcctgccgcttcgggatatgactgcccatcctgtcctgaaaagtggttctgagataggcggttctgtaaacctgattttcaaaagaatgataggatacttccagctccatcgttttgccgtttgagaacgtgaccgctgtgtcatcaaatgccgtcggttgaaaatctttaacgtgcacatgagatatccagccgcattgaggccttgcagaagaaagtgtagggaataaaaagatgtgatttgaagggtccaccataatcggcggcttgtgagaaattttaatcgcttcatatgttcccgcttttctcccggcatagctggagccaaagtagcggcagcttctgtcgatgatgtgaatcggcttcatgctgacatacagaatgcagtctttttcaatgaccttcgaccccattttaccgtctatttcctcaggcaaaacagcgatggttgaacgatttacttcgtagctttctaagggtgcgtgtattttctggcacataatgtgcagcctccaatccttttcttgaaaatttatactaataatctatcatctgtcattggaaaacgacaggttttttttgaatatagctaaaaatcaccttttaaagatgtaatttagtcttaaattactatttaaatattgtttttctttttcgtttcacctcatttatacgatgatcattttcgttttttcgtcaatttgcaggatatgtcgatatatttccaagtattagttgtctaaagattataaaaattaattgatttttccggccgttatccatatactataaaaaaggcattggggggattctttatgaaagagaaaaagtcgtacactgagctcatgaagtcccgcaacacgcaaatagcaaacgaattcgatgtgacaatggccgatatttacattcaaatggtgcttgatgaatccttgtataaacgccggctcgccatgctgaccatgcagattaataaggcgcttgatgataaaaataaagaagcgttcctcacgctttcaaaagaatatgcagcactcaaacagagtgaataagccaatccatatggattggctttttttacattatccgtttacgatggtgccgccgttcacatgaatcgtctgtcccgtgacataggaagaatcatcgcttgctaagtacaaatagctcggcgccacttcaacaggctctcccgggcgctgcatcggcacgtctgagccgaagacttccacttccttcgccgagaagctcgccgggatcagcggcgtccagatcggccccggcgccactgcgtttaccctgatgccctgagtgacaagagattgggaaagagatcttgtaaacgtgacgatcgccccttttgtcgctgaatagtcaatcaatgttttgtggcctttataggcggtaatggaggccgtattaatgattgaacttccttttttcaggtgggggagcgcggctttcgttaagtaaaacattgaaaaaatattcgtctgaaacgttctgatgagctggtggctcgtgattttctcaatccccggctgcacgtgctgctcacctgcgttgttgaccaggatgtcaatggaaggaaaggcttggcccgcctggcggatgacatcgttgcaaaaggcttcgtcgccgacatcccctgcgatcagcagacacttcgccccctctttttctacgtattgcttcgtctcttcggcatcctgatgctcatcaaagtaaacgatgaccacattagcgccttccttcgcgaataaaacggatacggcgcggccgatcccgctgtctccgcccgtgatgatcgccgttttcccttcaagttttttcgccgctttcggtttgtcaaaaacgggacgcgggtccattacatattcaaagcccggctgccggttttgatgctgcggcggcaaggttttcttcttctggttagccattttgatcactcctttacattaattactatattatgagtaatttgagcatcttatacgaatttcatgtatgaacagagtcttattggaaaaattaagaatatacaacagaggaggtaaatctgaattgactactttttcaaacgaagaaccggcttcctattggaaagcaacagctgacattccttcctttcccgccctcactgaagatacggaatgtgacgttgcggttatcggcggaggaattacgggcctgacaacggcatacgaactgacgaaaagaggtttccgtgtcgctgtcattgaagcagaccggattttaaacggaacgaccgcgggcacgaccgcaaaaatcaccgcccagcatgatttcatctatgccgatcttattcagcagatcggcctgaccagcgcaaggctgtatttcgaagcccatctccgcgccatggaagacatgaagcagatcatcaaggacctttcgattgactgcagactgattgaacaagacgcatatctttacaccaatacagaatcaggcgtcaaaaaaatccgcagtgagcaggaagcttataccaagctcggtattgaacacgagcttgtgaaagaacttcccgtccccgttgattgcaggctcggtctcgccatgaagaatcaggcgcaattccatccgcttttatatggtgcggcgctcgttaaagagatcgttaaaaacggggcgcggatttttgaacagacggctgcgatcgacataaaaaaagaaccgcagccggaagtggtcacgaaaaacagacacggcatcaagtgcagctacattgtctgctcttcccactttcctttttatgacgggggcgggctttacgccgccagaatgtatgccagcagatcctacgtactcgcggtaaaaccgaaacaagcgtatccggacgggatgtatctcagcatagacaagccgtccagatcactgcgatacaccgatttgaacggtgaaaaactggtgcttgtcggcggcgaaagccacaaaacaggccagggaaaagaaatgtccgagcattacgaagcgctgaaacaatttgcggaagacacaatcggagttgaaagcatcccatatcattggtctgcacaagaccttgtcaccattgacaaaattccgttcatcggtcccatctcgggcgatgaagaacatattttggcggcgacaggctttaaaaaatggggcatgacaagctcagcgctcgccgcgaagctttttgctgatcatattcaaaacaaaaagaacccgttttccggcctgtttattccgtcacgcttccacgcagatccgggactgaaaaaactgatttcctataatgccgacgtggccaaacaccttatctcgggcaaacttgagaggccggacgcttcacctgagactcttcggcccggggagggaaaaatcgtaacggtaaacggcaaacgggccggcgcctataaagatgaaaaaggctgtctgcatcttgtcgatacgacatgcacccatttgggctgtgaggtcgaatggaatgacggcgaacagacgtgggactgtccttgtcacgggtcccggttcacacctgacggcggggttgccgaaggtcccgccatcaagccgctgaagcgcctcagccaagattaactaaaccattctgtacgaatggttttatttttttcgcattaaaatatttttatcagattccttcattcaagttccttccataccgataaaaagaaaaagagaatatctgggggaacttatattgttatttaaaaaagaccgcaaaaaagaaacagcttatttttcggaagccgatggaaaaaaacgcatcgcgctttcaaatcaatatgcagatgtccaaaaacagctgaaaatggtcaggctcggaaacgaagaacttcatgtgcttgaagagctgcagccgttaattaaagaacatatctcaacaatcgtcgattccttttaccgaaacctggatcacgaaaaatcattaatgacgatcattaacgaccacagcacggtcgagcgcctgaaaaaaacattacggcgtcatatccatgagatgtttgccggcacgattgatgatgaattcattgaaaaaagacagcgcatcgcttccatccatttgcggatcggccttgaaccgaaatggtatatgggagcgtttcaggatctgcttctgtcgatgatgaacatatatgaagcaaccattccggatttgcatgagcttttaaaagcgatcaaagcgacgacgaaaatattgaatcttgaacagcagctcgtccttgaagcattccagagcgaatataactgccagcgtgacgaacaagaggaaaagaaagcccgtcttcatcaaaaaatccaggaaacatccggatcactcgctgatttgttttcagaaacgagcagagccgtgcaagagctggtcgataaatctgagggcatttccgaggcgtcaaaagccggcaccgtcacttccgtacatgtcgaagaaaaatcaatcggcgggaaaaaagagcttgaaagccagcagcagcagatgaataaaatcgacgccagtcttctgcagattgaagaagaaatggacaagctgaatgacatcgcacagcagatcgaaaaaatcttcggcatcgtgacggggatcgccgagcaaacgaatctcctgtcactcaacgcttcaatagaatccgcgagagccggggagcacggcaaagggttcgccgttgtggcgacggaggtaagaaagctttcagaggatacgaaaaaaaccgtttccaccgtatcagagctcgtgaacaataccaatacacaaatcaacatcgtgtccaaacatattaaagatgtaaacggacttgtaagtgaaacgaaagaaaaaatggcgcagatcaaccgtctgtttgatgacatcgtccaaagcatgaaaacgagcaaagaccagacaggcaaaatcgacgttgatttgcaggcctttctcggcggtcttcaagaagtcagccgcgccgtttcccacgttgcatcatccgttgattcacttgttatccttacagaagaataaagataaaccgaccggcctttttcataaagggccggtctttttaatgttaacttaaaatataatagagttgacatatataaagactcgctttattgtataaacatattttgataagctggaggaatacataatgaaattgacagaaatgatgcatattgccgtgtttaccgccattatgggacttttggggctgctcccgccgcttttcttatcctttacgccggttccgattacgctccagacgatcggtgtgctcttatcgggaagcatcctaaaaccgaaagcggcgtttttaagccaattgctgtttttgctgattgtggcatgcggagcgcctctcctttcaggcggcagaggcgggttcggggtttttttcgggccgagcgccggatatctcatcgcatatccgctggcggcattactgctgagcctcagcatccaaggccttcgctcagctgctgtcccccatttgtttatcagacagttcttgttcggcgtgctgtttttgtatgtcatcggcattcccgttcaggcttttatgatgcacattgatatcttaactgccgtaaagctcagcctcatctatgtgcccggagatctgcttaaagcggccgcagcctcattcgcagccgtaagaatcaggaaaactcttcaagcaagccggcttttgccgacgaaaggaagctgattttagtcatcatgattacatcatcatattcagatacagccggacaagcgccggaacagatcgcaattcagacagaaacagaacagatcacctatcaaacttggaacaggctagttaaccaaaccgcaaactggcttggcagcctttcaggtaagccggaaaacattgcaatattactgccgaacggcatcccatttttacaacttttcgcaggggcggcgcatgccggctgcacggcggttccgttagatccccgctcggcagcggcggaactcgcggaccagctgcacatcagcaaaaccggcctcgtcatctgtgaccgccggctgagcggcagactggacggcgtcaaaacgcctgtcatcctgtgggatgaatgcaggcctttgatcgaggcggaaaaaacggaaggcgcttttatcaaaaacgccggcctgcccttttataccggattcacctcgggatcgaccggtaagccgaaagccttcacccgctctcaccgttcgtggctggagagcttttcttgtacgaaacgtgaattcggcatttcccctgatgacaaagtgctggtaccgggcacgcttcgctcgtcacactttttatacggcgccgtcagcactttgtttatcggcggaaccgtcatccttcaaagaaaattcaacccggccggaatgaaagaccggctcagacaagctgacgttctatataccgttccgacaatgacggacgccctgctctcactagaggcgtttccggatacaccgctcaaggtgatttcttccggtgcagactggcccgcttcgtctaaacaagcgctgtcagagcgctatccccatttgcggttgtacgatttttacggaacgtccgagctgagtttcgtggcgttcttatcgcctgaagacagcgcccgaaagcctgacgcggcgggccggccgtttgaaaatgttacaatcgaaatccgccggcccggcggagaacgctgcatgccgggcgaaacggggaagatttttgtgaacagcccgatgaaattctccggatacatcaacggcgcaaaacctgatgattccggctggatgacggttgatgacatgggatatatcgatcgtgaaggctatctttatatcgaaggacgtgaaaacgggatgatcgtatcaggcggcctgaatgtattccctgaagagatagaacgtgtgctcaaccgctgtccgggcgtcagaaaagcggccgtcatcggcattcctgatgattattggggcagcatcgccgttgcggtgatcgacggacatgcaaatgtaaaggaactgaagaaacagtgccgcgagcagctggcggcatataaaataccgaaaaaatggttgttttcagaaataccggaaacagccggcggaaagatcgcccgtgccgccgtacaaacgcaggcaaaggacatgttggaatggaagctgtaattacggatgcgaaacggacaattttcgcccgggaaaacggcctgttaaaagactgtctcccagaagatttggcagctccgctgatccgccatttgagccggaacatgcccgaagacattgatgaagtcctgatcggaaacgcgacgggccgcggcgggaatctcgcccggctgtcggccttggccgccggacttcctttgagcgtgtccggtacgaccatcgacaggcagtgcggctccggactggacgccgtgagggtcgcgtgccactttgtcaaagccggcgcggggagcacgtacatcgcgggaggagcggagagcagcagccgttcccctttctcatcccgggcgcgcttttctcctgaacacatcggcgatcctgatatgggcatagcggccgagtatacggcacaggcttacggcgtaacgagaaagatgcaggacgaatatgcccttctcagctatgaacggagcgtcaaagcgcacgaagacggcttgtaccgccgggaaattcttccctgtcacggattcgccgtcgacgaaaacatgctgaaaaagcggaacatggagcctctcatctcccgcgccaagcccgtttttcagtccggagggtctgtcaccgccgccaacagctgcggaatttctgacggggcggcggcagtttgtgtgatggaagaacaaaaagcgcggtctctcggtttaaagccgggattgcgttttatcggaagcgcggtaagcggcgtccatccgcattatccgtcagcagctccggtttatgccgtcaaaaaacttttgaaggaacgggacctgtcaccggatgatattgatatatacgaaatcaacgaggcgtttgccgtcaaaatatgcgttttttcacagcagcttcgagtgccgtattctaaaataaatgtccggggcggcgctctggcggtcgggcatccgtacggggcttccggggcggcgcttgtcacccggcttttttatgaagcaaaaagacgcccggatgcccgctacgcagcagcagcgatcggcagcggaggcggagtcggactggcgcttctctttgaagtgttaacgtaacggcagtataatagatgatatcgataaaaaatgatcggagtggagactttatgactgccgtttgtttagtaagacatggagagactgattggaatgcccaaaagaagcttcaaggcaaatcggatattccgttaaatgcgacgggagagcgtcaggcgaaagaaacaggagagtacttaaaggggtccgaatgggatgtcatcgtctcaagcccgatgaaacgggccagaaaaacagctgacattattaacgggtttttgaatcttcccattgtggtcatggaagatttcagagaacggagctacggtgatgcggaaggaatgtctttaccggaacggtcgaagcgctacccggataaaaactacccgaacatggagacagcagaagagctgacagacagaatgcttgccggtttagtgaaagttcaggagcggtttcctgagcaaaaagttctgatcgtcgctcacggcgcagccattcacgccctcttgtcggccatttctgacggtgataccggcatccaaaacgcaaagcttgtcaatgcgtgcctgagcaatatcgaacgaattgaaaataagtggcgcgtcaaagattacaatgtaagcagccacctatcagaatcataacaaaaaggcccgaattcagttttgggcctttttggcgagcatttttttctgcagatcatgtaatatggcgtccgccccgtcaatgctccggcgctccgtccataccgccctgtccgcgcagtaaacgtgtccgttttttacggctgtcagctgtttccagaggtgatttttttcgagttctttctcaccgtccaacagtacgatgtaatcaggatcgatatgcaaaagctgcccgggcgtcatcttgatagagtctgatttcccgccggaatccgtctggaccgcataggtaaaccctgcgagcgtcaaaagccgggacgtaaaaaactgatcatcctttacggaaatgctgtcatttgcagcgtcaattaataaaatcgtgccgccttctgcatccagctttcttttgatgtcattcagcttttcttcctgagccgacaattgtttctctatgatgccatctttaccgaccgccttttcaatagtaagggcagcgtcaaccgcatcctgataatccgcagcttcattttttaaagcgattgtcggagcgatctttgtcagttttcggtatatccccctgtgaaggcttgagtctgcaatgatgagatcgggctttaacgaagtgatctttttcaaatcgggatgtgacgggggcccgccggacggactgccgtcgtttcgctctgtccgattatccgccgcagccacaggctttatgccgagatcatggagaatatcattaaagcccggattcaacacggcaacgcgctgcgggtgcgcagccacatgcgccgtccccagatcgtgcctgacggcggtttcatgttcctgttctgagcatgccgttatgaagagaacggataagatcatcagcatactgaaaatttgtttcatctgttccccctctttcgtttttccgcaattatatcattgacaatataagtatcaatgatattcattatcattatttttataaaatggtttcacagcttttctccgtcaagaaagccgaagactgattcatgccggccgctttatttcattccgctttcgtttccatcagacttctgcattcaacaaaaggtgacatttatcctgtttttgccgcagcttccgaaaatggaatcaaaccgttcgacccagcaaacaagagagcgattgcggctgtgtacaaatactcatgtccttccatcggttttttccattaaaatttaaatatttcgggttcctattaaacgaaagagagatgatatacctaaatagaaataaaacaaattgaaaaaaattgggtctactaaaatattattccatgctatacaattaatccacagaataatctgtctattggttgttctgcaaatgaaaaaaaggagaggataaagagtgagaggcaaaaaggtatggatcagtttgctgtttgctttagcgttaatctttacgatggcgttcggcagcacgtctcctgcccaggcggcagggaaatcaaacggggaaaagaaatacattgtcggatttaaacagacaatgagcacgatgagcgccgctaagaaaaaagatgtcatttctgaaaaaggcgggaaagtgcaaaagcaattcaaatatgtagacgcagcttcagctacattaaatgaaaaagctgtaaaagagctgaaaaaagacccaagcgtcgcttacgttgaagaagatcacgttgcaaaagcgtacgcgcagtccgtgccttacggcgtatcacaaattaaagcccctgctctgcactctcaaggcttcactggatcaaatgtgaaagtagcggttatcgacagcggtatcgattcttctcatcctgatttaaaagtagcaggcggagccagcatggttccttctgaaacaaatcctttccaagactacaactctcacggaactcacgttgccggtacagttgcggctcttaataactcagtcggtgtattaggcgttgcgccaagcgcatctctttacgctgtaaaagttctcggcgctgacggttccggccagtacagctggatcattaacggaattgagtgggcgatcgcaaacaatatggacgttattaacatgagcctcggcggaccttctggttctgcggcgttaaaagcggcagttgacaaagccgttgcttccggcgtcgtagtcgtagcggcagccggtaacgaaggcacttccggcggctcaagcacagtgggctaccctggtaaatacccttctgtcattgcggtaggcgctgttaacagcagcaaccaaagagcatctttctcaagcgtaggttcagagcttgatgtcatggcaccaggcgtctctatccaaagcacgcttcctggaaacaaatacggcgcgtacaatggtacgtcaatggcatctccgcacgttgccggagcggctgctttgattctttctaagcacccgaactggacaaacactcaagtccgcagcagtttagaaaacaccactacaaaacttggtgatgctttctactacggaaaagggctgatcaacgtacaggcggcagctcagtaaaacataaaaaaaccggcgtcggccatggccccgccggtttttttattatttttcttcctccgcatgttcaatccgctccatgatcgacgggtggctccctctgaaaattttgacgagaaacggcgggttgactcggctcagtcccgtatcggccaagtcctgaaacgtctcaatcgccgcttcccggtttccggtcagctcgatgccgtaacggtcggcggcgttttcctgataccgggagacggcattcgtaatcggatcagaagcaaaactgagaacggatatgagcagcaataacagcgggagggcggccagatcttcaggcccctttatatgaagcattcggccgaagaatttggacagccgcttataaagcttgtcaatgatatagaacccggctaatgacagcaggagatacccggccagtccgatgtacacgtgcttcatcacatagtgccccatctcatgccccataatgaacaaaatttcccgatccttcagtttgttaagcgtcgtatcccacaaaacgattcgcttattcgaaccgattcccgtcacatacgcattcagcgcattcgttttctccgacatatttacttcataaacatggctggccggaatatcagccttatcggcaagcgacaagattttgctttccagctccttgtctttcagcggatagaaatcattgtataaaggatcaatcacgaccggctgcaggaaaaacaaaaacagggtaaacggcacagtaagacaccaagcgtaaaaccaccatttttttgtatgcttcgtgatcagccagtaaaacacaagaacacacacggcaaacagcggaaaactgatccagaaatcaatgacatggtctcttatccagcttgctgttgtctgcgtcgaaatatgatacgcaagcgaaacccgatatccgatccattcaagcggaagcgaagccgccgtaacgatgagtgaaatcacaaatacgaagcttccgatttgcagcacccgaaagcgcaccgctgcttccagccaatgctttatttttttggcaagccccgtaatgagcagcagaaaaaataaaaaccaatctaacggcgcaccgatgaaaaataaaaaatcctttacatttgaaaagttttcagcggcttccaggcggcccgggtccataaacgaggacggatcggctttcgttccctttacggcctccgggacggcggagtcgcctgtcataaagaaataccaatagaaaaaaaggccgtacagcacataggcaagtcccgctgccgctatccatttgcgcatggaagtctccctccttagccttatgacttactcctattgtaagcataaatgcaaataaatagaaccaagcctccgaaacggatgttaatcttttcacaacagaaaagaatggaacaacaggaagcgggaaagactaaaaaacggagtgatgaatatgaaaaaaataatcgcgtttattgtagtaatcgcccttttggttattgctttcttctatgtatacagccggaccggcgatgtgtttccatcaagcaacgcagatctgattattctgtctgagcacggaaaaaaagaaatcaaaattaaagacaggcagaatgtaaaagatatgctcgatatcttgaaccaaggaaaacaagtcaaactgaccaaaagtgtatctcccgattacgacggaacggtcaaataccatgaagaccgtttcgattcattcagcatgtggctcgaaggcggcaattatatgctgtacaagtataaaaacacgtattacaaactgacccggcatgatacgaagcttgtgcaaagcatcattaaggaagaatcgcagagctgaccggatcagcatgtaaaagcgaagccccccggcttcgcttttcgtccgtcatttcggaagcatgtcccggaccgcccgcctcagcagcttcccggtcgcgttcttcggaatctcatcaagaaaaaccacttccgccggccgtttatattttgccaaatgtgtttcacagtaatcaaaaaccgcctgctctgtcagctcaccgtcccccggcactatataagcatgcaccgcttcccccgttttggcgtcaggaacgccgatgaccacggcttctttaatgccctcatggctgtagagcacttcttctacttcgcgcggatagacgttgtatccgccgacgagaatcatatctttttttctgtcgacgatataaaaataaccgtcttcatcgcgcttcgccaaatcacccgtgtacagccagccgtctttcagcgcgtgctccgtctcctcgggcatcttgtaatagcctttcatcacattcggccctttcacgatcaattctcccacttgatggtcgggcaattcgcgtcctagcgtatcgacgactttattttcgacatgtaaaatattcgtcccgattgagccgggctttctcccccggtcaaacggattaaaacaagtaaccggagacgcttcagaaagtccgtacccctccagaatggtgacgtcaaaggtttgttcaaacgtctgcaacagagcaacaggcatggaggccccgcctgaaatgcacagtctgacggacgtaaaatcctccgccttgccgtgctcgtattgatacagatagttatacatcgtcggaacgccggcaaaaatggttgcctgacggcttttaatcagtttaaacacagaagccgggctgaattgcggctcgattaagacacacgctccgctcatcagaggcgcattcatacaaacggttaaacaaaaaacgtgaaacatcggcaatgccgccacaattttgtctttctcattcattcctaagtatccggcgacatcatttgcattggagaaaagattctgatgggtgagcatggcgcctttcggttttccggtcgtccctgaggtgtataaaatgacggcagtatcatctttggacaatgtcggataagttctgctgcgctccgccgggcgaagcatttttgtaaacgttgtcatttttaagcgcaattgagggtcttctgtcgatggagcgttctctgctgtctggctgataatgatatgctccagcagcggcagcgagccgtgcaggctttcaaatacgggaattaaaaggtcgatgccggcgatcgctttgacatcgccgtttttcagcatgtatgcgatttctgaaggtgtatataccggatttacaggtatgacgacaattcccgcttttaacgcgccgaaaaacgcaataacaaaatcaggcgtatttccgagcagcagcgcgagatgatccccttttttcagtcccctgtcctccaagccgtttgcaaatgctttgattttacctgccagctcctcatacgtcatgtactgatcttgaaacagacaagctggtttttccggtttctgcgatgccgtttcttccaatttggaaaccagattcattttcccacccctttaaaaattgtaatgaatgaatagtcattcatttatccggaataaacgttcacttttattatagaaaaatatagaaaaacactcaagggcaaaaagccccgagtgccgtaaaaccggaaactataattgtttcagcgcttcactgaccggcgtgccgcccgctgtcagatcgaacgctttttcatacgtattcggttcatcaagagatgcgataacggtcttggcgacatcgtctcttgaaatggaacctctttccaaatcggccgcggctttgatatttcctgtgccgggatcatttaataacccgcccggccggataatcgtatacgtcagaccgctcgcttcaagaattttatccgcataatgctttgcggcgtaatacggcttcagcgcttcattccaattgccgcggttatgagcctgaagggcgcttaccataatgaaccgcttgatgcctgctatctttgccgcttctatcgctttcgcggctccgtcaagatcaatcaaaagcgtcttatcgtatccggtgcttcctcctgatccggcggtaaacacaatcgcgtcacagccttcggcggctttcgcgatgtcttccgggcttccttccaaatctgcaagaacggcttctgttcccgcggcttgaagcgcttctttctgctcttgtttccggaccatcgcccgcagcgtatgcgtgccgtctttttgaaacagcccggtcagccgctgtccgatctgtccgtttgctccgatgagaaatactttcatcatgatccctccccattcattatggttctatcatttcacaaaaacgggcgctgattcaaatcatgcgttcggcaaatgttctaataaatcagctcgaggaaatcttccagctctattttgccgaaatactgtttcagatcgattccggccagcgcctccttgatagcggttcggtcatactgttttccggtcagcgcctgttcgacttcactcacatctttcgcaccgaagaaatcaccgaaaattttgcagtcctgaatgattccttttttcacttcaagacgcagatcaatcgatccgaccggataacgtttcgaatgctgaagattaaatgcgggcgaccttccgaaattccagtcccagttttgatagcgctcttcggaaatcttccggatcgctttccagtcttcatcggtcagtttatattccggcacttcggaaagatcatttgtattaaaaatatggtgaagcaggtgctttttgaattcatccgccgtcattttgtcatcaagaaactcgctgatgttggcgacacggcttctgatcgacttaatgccttttgattcgattttgtcttttttcactttcaaggctgacacaacatgatcaatggcggaatccagcattaatgttccgtggctgaaaatacgccctttcgtcgaaaattgagcgttgccggaaatttttctgccgtccgcgacgatgtcgtttcggccgcttaattcagcttccacaccgagctggcgcagcgcctgaataacgggttcggtgaattttttaaaattgtgaaagctgtcgccgtcatccttggtgataaaactgaaattcagattcccgaggtcatggtaaaccgcgccgcctcctgacagccttcggacgacgatgattccgttatcttctacgtatttcgtattgatttcttctattgtgttttggttcttaccaatgataatcgacggctgattgacataaaacagcaggtatgtctgttcagggtcgagatgcttcacgcaatattcctcgatcgcgaggttgatcctcgggtcggttatgttttggttgtcgataaataacatggtgctcctcctttatttctcccacttcaatccggaagcggcgattgtcacttcgcccccgaacacggattccgcttcttctttcagcttccggtgctcgccgaaatgaggcagatgcgtgagaatcagctcccccgctccggcctccttcgcgatacgtccggcttccaaactgttcatatggccggctgacgtgccgtcctggtccgcgtaaaaattgcactcgcagatcagcagatcggcattttccgcaaaagggataaacgcgtcctggtagcttgaatcagccgtatacacaacagaagctgaaccgtcagtaatccgcatcgcataacaagtgaccggatgcaccgttttcagaaaggtaatggtgaacggacctagagaaagcgggcggtccggctgataggccactccctttgtatgcgttttatatgtaaggcgctcaaactgttctatatcagcatcatgcccgtaaatcggcagtgcatgcgtcccttttccaagaaaggagccgacctgtttggcaaattgaagcggcccgatatcagcgatatgatcatggtgataatgggacaaaatgacggcatcaagctcttctgccggaacataggcaaacagctttgataatacggcgcttccgcaatcgacgagcagagaatagccgccggactgaaacagatagcctgaagttgcttcgtttgcggccggaaacccgccgcagcatccaataactgttactttcatataatcctccgaatgtttatgataaaaagatcctttcctccaatatacctatttttcgtacaaattgcatgttttaaacattgtgtcaaaacagccgttgattttccaaaactgttataatacaatgtaaagacaaaacaatgaaagagggatgggtatgttggaaaagatgtcggattttttcagaaatttacccggtaagaaatgcgaagaatgcggaaatgagattgttgagcagtatgagtgtcacattaatctgtgcaatgactgcttgaaaattaaggatatgtgacaatagggcgccgcacaattctaagttgtgcggcgcccgttttttcggccctcatcatactttctgaatagggcgttattcaccattattagcaattatctgtacgttttaaaagattcagtattttcaatctatatttttctatagacggattgttttcttttctattataatttgttctaatagctatctttttagatacttattgcacttttttcttcgggaggtaatctatgaaaaaattacgctttggactagcgacgcaaattttcgtcggactcatactaggggttgtagtcggtgtcatctggtacggcaatcccgccattccaacatatttacagcctatcggcgatttgtttttacgcttaatcaaaatgatagtgattccaattgtcgtctccagcttaatcatcggcgttgccggcgcgggaagcggaaaacaagtcggaaaattaggcttcaaaacgattttgtattttgagatcattactacttttgccattattctcgggctggctttggcgaatctgtttcatccgggaacaggcgttaatatacatgaagctcaaaagacagatatcagtcaatatgttgaaacagaaaaagaacaaaataacaaatctatcgcagacacattcctgcatatcgtaccgacaaacttcttccaatcattagccgaaggagatctgcttgccatcatctgctttaccgtgctgtttgcactcggcatctcggcaatcggtgaaaaaggaaagcccgtattggccttctttgaaggtgtttctcatgcgatgttccatgttgtgaacctcgtcatgaaagttgcgccgtttggtgtttttgcgttgattggtgttaccgtttccaaatttgggctcagttccctgctttcactcggtaaactggtcggtttagtatatgtagctttggctttctttctcattgttgtattcggaatcgtcggaaagcttgccggagtaaacattttcaaattcctcgcctatatgaaggatgaaattttattagcgttcagtacgtcaagctccgaaaccgtactcccccgcgttatggaaaaaatggagaaaatcggctgtccgaaaggtattgtttcctttgttgtgccgatcggatatacctttaacttagacggatctgtgctgtaccaatctatcgccgctttattcctcgctcaggtataccacattgacttgtccatttggcagcagattacccttgtgcttgtcttgatggtcacttccaaaggaatggctgccgtgcccgggacttctttcgtcgtcctgcttgcgacattaggcgcattcaacattcctgcagaaggccttgcattcatcgccggtgttgaccggattatggacatggcccgtacggtcgtcaatctgaccggaaacgcgctggcatccgttgtgatgtcaaaatgggaaggccagtatgatcccgttaaaggcgcgaaggtcatgagcctcgccaaaacagaacaaaacacaaccatctcaggttaaaatgaaaaccctgcacggaatgatttccgcgcagggttttttatgccatcggcgatagaacgtaccggtgcaaaagcttcgccgtattaagaagcgataattcatgcgtgcgttcaaaagcgtgtgaagcgtcaattcccgggccgatcagcccgtggacgatgtcatggcccgaacggatggctgctgaggcatcagaaccgtaatacggataaatatcaagctgataatcaatgccatagcgctccgcaagcccggccagatgttttctgagctgataatggtacgggccgctcgcatccttcacgcaaatggagacggtatattcatccgtagactggccgtcgccgatcgctcccatatcaacagccaagtattcaacggtctcaggaggaatgttagaattgcctccgtaaccgatttcttcattattagaaatcagaaaatgcgtcgtatacggaagttcgattttctcttccgtgatgcggcggattaaattcaagagcagagccacgctcgctttgtcatcaagatgccgggacttaataaagccgctcggcgtaatctgcacgcgcgggtcaaatgagatgaaatcgccgaccctgatgccgagatcggacgtctcttccttcgtccggacaggctcatcaaggcggacttccatattctcctgattccgctctgccttgccggcgtccttgtagacgtgcactgaagtctgatgcattaagatggtgcctgtataggttttgccggaagaagtttggatctcgcaatattctccttcaattgagttatatcggaagccgccgatcaagtcaatcttcagccggccgtccgcctttatctcctttaccatcgcgccgagcgtatcgacatgcgccgtcagcaatctgtgtttcttatcatcacggccgggaattgtgacaaaaagaccgcctttgcggtttctgtaagaggagacgccccattcttttaaaagactttctgtataggcgataacctcgtatgtattgcccgtcggactcggaatcgacaccaattctttaatcagttccatcgtatgtttcatattttccacaggtcattcctcctatcaattttattcttcttaaaatatactcttttgatccataacccgtccaatcttttccttctcttttttcatagaatgaagggagcatgagcataggagggaaatgtatgatcagccgtaaaccgcacaagcggaaaaggtttcataatgattggtttgaggattggtttgaggatgattggtctggtgcagccttctggggctgtaaaaaagaagaagatcactgtaaaaagaaaaaagaagacccttgtaaaaagaagaaagaaaaaaagaagcatcatcattcatgccgccgctgctgccgtcattggtaatcgttcacacaagcccgttttacaaatagatttctcatgctccccaaacagcggatgctggttgggtttttttattaaaattagtactaagtaataatatcaggtgttataatctgatataaaggagtgattttttcatgtcaaaatctaagattacagcaatcggtacatatgctccggcacgccgattaacaaacgcggatttggagcgcatcgtcgatacatctgatgaatggatcgtccagcgcaccggtatgaaggaaagacgcattgccggcgaacatgaattcacatcggatttgtgtgtggaagcggtgaaaaaccttgcagaacgatacagcggaactcttgatgatgtcgatatgatccttgtcgccacaacgacggcggactatgcgtttccaagcaccgcggcacgcgtgcaggcttacttcggctggccgcacacgggggcgcttgatattaacgccacatgcgccggactcacttacggccttcagctcgcagacgcattaattaccgccggttcccatcaaaaagtgattgtcattgccggtgaaacattatcaaaggtaacggattatactgaccggacgacctgcgttcttttcggagacgctgcaggcgccctattggtggaacgcgatgaatcagcgccgggcttcttggcagccgtgcaaggaacagcgggaggaagcgcggacgtgctgtatcgcacgggactgagcgcagaattaaacggcgagccgcttaaaggcgaaggaaacatggtgcaaaacgggcgcgaagtatataaatgggcggccagaaccgtgcctgaggaatgcaatgcccttttagaaaaagccggcttttcaaaagacgatctggattggttcgttcctcacagcgccaacatgcggatgatcgaatccatctgcgaaaagctgcccttcccgcttgaacggacgttgacaagcgttgaatattacggcaacacttcatcggtttctattattctcgcattggatgaagctgtgaaagcaaaaaaactgtcggaaggccagacgctggtattattcggattcggcggcggattgacgtataccggactgttggtgagatggggattttaatagtacgacgatcgaaatctaaaaaaagaggccccgagcatctgctcagagcctctttttcttatgctgttatttcttcttccgttttgtgttcttttttgctttgcaccgtaaaatacacgatggtcagcgcgatcatgacaacggcgatgcccaacagaatggatgcctgctgccacatatagccgtaatcgccatttgaaatgacggcgcggaatccgttgatgctgtaagtcatcggcagtgccccgtgaatcacttgatagaatcccggcaggagttcaagcgggaaggttcctccgcttgccccgagctggagcaccagaatgatgacagcgataaagcgtcccggatttcccatcgttgtcgccaataattgaatcatggacaggaacgcgatgctggtaatcattgtaaatagatagaatctccacgtgctttccacatcaagcccaattcctttcaacagaaccgtggcgacaataacggattgaatcagtccgacaagcagaataacactgaatttgctgaggaaccattcaaaaccgtttctcggacgccctgaagcttcactcagagggaatacgaccgtcagcatcaatccgccgacatacaagcccatagagagaatataaggcgtcagtccggtaccgtagttaggcacggaatgaatcgcgttatcgtccgtttttaccggatcggcaaacatgctgtacgttttgtcatctgtcttaatgtccccggtttgatcggccgcatctttcagctggctggacaattgtccggtgccgtctaaaagtttgcttaaaccggtgccgagagacgcttgaccctgctcaattttggacgagccgtcatggattttgttttgcgcgtccagcagtttcgttaagccgcctgacacttggccgctccctgacactaacgcttctgatcctgatttgagctgtccgaacttgctgttgtattcgccgatgccggctgtcagtttgttttggctttcaaaaacggtctgcgctccgctgtacaatttatcagttcccgctgtcagctggttaatcgcgtcttgtaccgccgctgcgccgttatacagtttcgatgtggactgaggcagtgctttcagctgatcagccttcgcttttacatctttgagcgcgctttttatgactgacatatccggaagctgaatatctccgccggacggaagctggctgacgatattgtctaaatccggaaggtcggctttcggaagcttctcattcagaagctgaacaagtttcgctttttgctcatccgttaagaaatcactgtccttaatcacctttttgaccgcgtcatcccgggcatccaggctgtttttcagatcagaaagcttcttcttaaactgctgcaggtccttttcagtctgttcgagctgcccaaccgcgttttcaatgtctgacaggttgactgaattgatcgcatcttcaaatgccgccgctttttgcgacacttcctgcgccttgctgtttaacgcgcttaatccattcgttaaatccggaagcttttgctggagctgcttttgtgcgtcaaggcttgttttcagcccgctggccacttggcctcctcctgaagcaatctgtcctgatttatcttgaatttcggcgcttgcgctctgaagttttgcgatagagctgtcaagcgtttgaattccgcttgtcactttcgccgcgccgtctgcaagctgctgtgttttatcgccgatggtggcagtgctttcagtaagcttcgctaaattttccttcagcttggcgctgccgtctttcgcgtttttcgtgccgtcgtctattttcttggctccgctgctggctttgccgagccctttggcaatatctttaaagttatcaaaaatgacttttgcgtattgctctgtcacttctttcgacacggaggctttcagtttgtcgatcgccttttccccgattgtcgcgccgacatagtttgatccggcattcgtatgatatttcagatccagcttcttcggatttttatccattaccgtgctggcgtttttagaaaaatcttcaggaatctcgaccaataaataatatttagcatttaataagtcctttaacgattgatcaagatcgcttgaaaaatgccaatcaaaattatcatttttctttaactctttcacaagatcgtcaccgatctgaagatgtttcccttcgtagtccgcccctttatcctggttgacaacgacaaccggcagctgatccaccgtgccgtacgggtcccagtacgccttcaaaaacactccgctgtaaatcagcggaacgaataatatggcaatgatggggattaacagtttcttgttcgttacaatgtctttccactggctttttattgtattcaaccctgttgcctccttccgcaaactgactcatttgacaaaacggtcacggcacctaaaaagtgaaggatcatctattatttagataatccttgaccaacatacatttccagcaattcagcgatcgtctctttttcaagaggcggatggtttttttcccagtcaaatatcagtgcgatgtagagcttgagcatcacaaaagcggtcagttccggatcacacggtttaatgcttccgttttcaatggctgtttctatcttttctttaatgtatgacagaatggcccgctccattttcacaatgacatcctgaacggctattgtaccaatctcggcgttctcctgaaaaattttaatagtcagctggtgtgtttttctgaattccaaaatcgcgacaagcgcccggtggacattttcgtgaaatgaaagctccggtttcatcgcttcgtctgcgtgttccttcatttctcttaaaatagtggtgaaaatatcatcaaacagttcttctttgtttttgaaaaacgtgtagatggttcccttccccacatttgcaagctttgccaccagatccattgtcgttgctttgtagccgaattgtgtaaaagacttcgttgccgcttccagaatgagctttttccgatcgacggacatgtttcccacctcgttaaattgaccgtttgaacgttttagtcattttgtacataagataacttatcacagtcacaaagaagattcaaatgttttctctctttattggtgttccctttacagaacgggaacatgcaaaaaaacctccgttttacgataacggaggctggtacgtttcaaataaataagccagtgaatcgtatacggcggcttttccctggtcgatacagtcggggatgcccaccccttcgaaagacgcgcccgtcgcgtatacgcccggataggaagctttcagcgcatctctgaactctttgatgcgctccttatggccgacatggtattgcggcatgctttcgttccagcgggtcacacaggtcatttccggttcgccatttattttcattacttttttcaaatcttccattacgattttaatgatctcgttatctgaaagatctacgatggattcatccccggcctttccgacgtacgccctgagaagcgttttgccctccggcgccgcgtgcggccattttttattcgtccatgtgcaggccgtgatggagaaatcgctgtttcttgagataacgaatcccgtaccttcatgctccatcttgacggcaccctcagggaaacctaaggcgacgttggcaacggacgtagaatgcatgtctttaagacatgaaaccgccggcagatcagaaagcattttcgccgcggctttatgcggagctgtcactatgcatccttccgcatagagcactttgccgttatcaagcgtcacagaatatcctttctcctcgcggccgatatgggtgactttcgttcctttcatcacccttgtcagcgtaagctgcttttccagctcctccaccaacgtttgaagccctgttgtcagcgttaaaaactggccctgctttttggctgtcagctgctgtcccgaaggctgcggacgcgattttttcatgccgagaatcaggcttctgtgcttctgctcagtctgatagaattgcggaaacgtggacatgaggctcagcttatcaatatctccggcataaatccctgataatagcggttctattaaattctcaacgacttcgtcaccgacgcgtctgcggaaaaattcacccagagactgatcttccttcggtttgctcgcaggcaggacaaagtcaagcgccgcccgcgcctttccgggaacagaaaataaaccggtggagatgaacggagcgattttggtcggaatgcccatcaccgcgcccttcggcatcggatggagcgtctcgttgacgagcacgtaagactggccggtcgcattgttgacgagcagatgctcaagccccaaatctttgacgagctgcggcgcgctttttttcctttccaaaaaagaatccggcccccgctcaatgatgtagccgtctttatgctgcgtctgaattttgccgcccgctctcgggcccgcttcaatcagagtgacctcaagcggcagctgttttactttgatttctttttccatgtagaaggcggcggctaatcccgttatgccgccgccgatgatgaccagatgttttttatcgccactcatttttatcgccttctttaccgtttaattctacttgtccagctctttcagcacgaccgctgcaagcgcgtcgataaattcaggctgtgcgttcggcatagccggacgatagtagcttgcgccgacttcttcggtcacagctttgcattcataatcattatcgtaaagcacctctaaatgatcggcaacgaagcctgcgggcacgtatacaaatgctttataaggatgcttttggtacagatcgcgcgtgagatcctgcacatccggcccgagccacggatcaggggtattcccttcactttgccagccgactgcgtaatcggtaattccggcgccttcggcaatcagttttgcggattcctccagctggtcaggatacggatcgccgtattctttaattttttcaggaaggctgtgcgctgagacgatcagcatcgcgtcatcccgttcttctttcggcattgattcatacgttttcttcacctggctgacccaataatcaacgaatttcggttcatcataccagctttcaacagacttgatggtcaagccgcctagcttctccgcttcttctttcgcgcgtttgttgtatgactggacgctgaatgttgaaaaatgaggggcgagcacaaggctgacagcttctgtaatgccgtctttatgcatgtccgccaccgcgtcttcaataaacggttcaatatgttttaatccgatgtacactttgaatgttacgtcatcctggatttcatttaaacgctgtgcgagcttctccgcctgctcctgcgtaatttttgcaagcggcgaaatgcctccgatcgcttcatatctgtcttttaaatcttgaagcatatgaggctccggctttcttccgcgtctgatatgcgtataataacgttctatgtcctcttctttgtaaggcgttccgtaagccatgacaagaagtcccattttctttttgctgctcattttgttaaacacctcttttgatggtctgtctaccttgattttgacaggaaaatcttcttataaccaacgatctgctcaggaagattgttccgtttttttggccgcggaatattcatgtacaaacgccgtcagctttttcagcgttgccggattgacatctgggaatacaccgtgccctaaattgaaaataaacccgtccgttttcatgccttgatcaagtatcgctttcgcttttttctcgatgacttcccaaggcgcaagaagaagcgacggatcaagattgccctgaaccgtttttgtaatcccttgttttctggcgtcatctatgccgagtctccaatcaagaccgacgacatcaagaggaaggtcatgccaatccccggccagatggcttgcgcctacgccgaacatgatcagcggaacttgttctgctgaaagctcccggaaaattctgtccatcaccggttttataaactgccggtaatcttcgcggttcagcgcgccgacccatgaatcaaagatctgaatggcttttgcgccggcgttaacctgcgctttcgcataaacgataatcatgtccgcgagcttgtccatcagcatttgccacgcttgcggcatactgtgcataaatgcttttgttttgttgtaatttttagaaggcccgccttcaatcatataactggccagcgtaaaaggcgctcccgaaaaaccgatgagcggaacattcagctgttcgtttacgagtaatcggatcgtttccagcacgtaaggaacatcctgttcgggattcagttcgccgagcttttcaatatccgcagcagagcgcaccggctgatcgatcaccgggccgattccgttttttatttcaacatccactccgatataaggaagcggcgtcataatgtctttatataaaatggcagcgtccactccgtactgctcgaccgggagcctcgtcacatacgcgcacagctcgggctgatgcgtaatttcgactaagccgtacttttccttcagcttgcggtattccggctgagacctccccgcctgtctcatgtaccagacagggacgtgatttgttttttctccccgtgccgcttttaaaaacgtatcattaaacgcttctcgtttactcatctgaatttccacctttcctcctgcaaccatacgttcgtgttcttcgcccattacactataccttgttttttcaaaagcgtatagaattgaggcttaatgttcaaaaaatcgccgaattcacgattaagaagaaaaaagcttcggctgaacgtattccgttccctctccttcttgatccgtctgtgaattatatggaacgactttgtatgaagcccctgaaaacagattggcgtacggtatgtcaaagctgccttttcctttcaccgaatccagaagtttgtcttttccgtctttcttctcatatattcggtaaacaacccgatcatccttttgaatatcccattttaattgaaccgtaatcagtcccatcgccttaaatgtataacgggccgacagggactttaccgcctccagctcaatcgggctgcccagttccttcacattttcaggctttttgaatgtccggccgttttcccccgcttttgtgacgatatctttaaagagtctgaccgggtattggcttccgcctttcaggtaatgggttttatccgttttgtcatagcccatccagacggctcccgtcagtccgggagtgtatcccgcaaaccaggcgtcctttgtcgcgccggggacgccgggaaatgtggtcgtgccggttttccccgccaggtcaccttgatagctgccttgtgaagcggttccttcttttacgacctgctgaagcattctcgtcatattccatgccgtctgtccgctgaagacgcgcgttttgccgtttttaggcccggacaacgtttctccgtcttcgtccgtgatgttctctataaaaaatggcttcgtatacattccgtttgccgcaaaggtatgataagctccggcaagctgaagcggggtgacgccttctgacagaccgccaagcgcaatcgcgagtccgttgtcagaaatgttcatgccgtttttctcaagatacgattttcccgtatccacgccgatctgcttcaatgtccagacagcgggcgcatttatgctgtaagtgatcgcatcctgcatcgtcacttcccccttgtactgtccgtcataatttttcggttcatacccgtcgtaggacgtcagtttgtcttggagaagcgaatacggtttgaacttgtcttcctgcatggcgggcccgtatacggcaatcggcttaaacgttgagcccggctgccgcttcgccgtaaccctgttgtatccttttgtcacgtagtcgcgtccgccgaccgccgcgcgcacgcctccggttttattatcaataaagacggcgcttccctctgccgcctgatccgtccccggaaaatagccgctttccttcatgagggtgtatgccgttttctgcagcttggaatcaagtgacgtccggatcgtatagccgccttgaagcagctgttcacccgacatcgaataacgggattccgcctccttgatgacaagatcgatataactgtcaaaccaaggcgtttctgatgttttcttgacatgaagccccaatgtccggccctgggctctgacggcttccttggcgctgatatagccttggtcgttcatcattgcaagaatcgtatcgcggcgttctttatttttatccggatgctgaatcggcgaataaagagatggcgccttcggaatcgctgccagaacggctccttccgcaacggttaaatcttttacttctttattaaagtagtagtgggacgcggcttgaatgccgtaaacgccatggccgaaataaagctggttcaggtacatttcaagcagcttgtccttgctgtaatcacgctcaagattgatggcgataatgacttccttcgtcttgcgcaaaaatgttttatcatgagtcagaaaaatgtttttcgccagctgctgggtgatcgtgctgccgccctccaccttgccgcctgctaaaacatcccggaacaccgcccggccgacagacttcacatcaatcccgtgatgttcgtaaaaccgtttatcttcaacggcgataaaggcatctctcacatcttccggaacctgctgaatggataccggctcgcgattttccgtatagaggctcgcgatttcatcgccgttttgatcgacgatttttgaagatgcgtgcagtattaatttcttttcgtcgatgacataatggccgagaaatataatgataatgtatccgattaacgcgagaaaagcggttgccgccgcaattacagccggaataaagaatctttttttctttttcagcataagtcacctcgcctttcttaacttgtagtatgggaaatattgtttcgaattatgtcagaatgagtcgccaatagaaacttataccactcttttgatatactagcaagcaggaggtggctgatatgaaggtttatattacatacgggacagccgattttttaaagacgattgcaaagaaacacccgagtgagaatatggtgctgatgcaaggggaggataatgcggttttaattcatgaaacaaatggagaaaccgtttttcaggcgccccattcctatgaaagcatcgacagcgtcggggaaatcaaaaatccgggatacgccgtcctcaacaacatcgccgttacccaggaaggccgtccgctgtttgaaaaccggtttaaaaaccgcgccggcaaagtggaaaatgaacccggttttaaagccatccgcgtattaagaccgctcgaaggcgatacgtatgtcattttgaccctgtgggaagaggaaaaagcctttcaggattggcagcagtcaaactcttatcaggaagctcataaaaaacgcggaacatctgccggcatcgacacgacgtctattttctcccgcccgtcttatgtaaccgcttattacgcaatagactgaaaaccgccggagattctccggcttttttaatgtcccgattttacgcatccttctttgcaccttccgcccgcctatgaataacctgtagcaatcctatttataaacggagtggttcaattggggatcggcgtctattcggtacatctgctttatgttgcttttatcgcggccattatcgtttttatgctcctcaggaaagatacaacctttatttcactcgccggcatttttgtgattgcgctatggacgacgcattcattctccgcttcggtcagcagcctgtttcacagcttcacgtatgccgccggagaattgctgccgacgatttttatcatttgttttatcgtggcgatgagcggccttttgaccaaaaccggtattaatgaagcgatgatttctccgtttgcaaaggtgatgaaagggccggctgtcgcgtattgggttatcggctgtctgatgtttgccatctctctttttttctggccgtcaccaggagtggcgctgatcggcgctgtgctgcttcccgcagcgatccgagcgggcctttctccgatcgccgcggctatggcgatgaacctgttcggccacggattcgctttatcgggggattacgtcattcaggcggccccgaaattaacggccgatgccgcgggcattcccgtgagcgatgtcatgcaggcaagtattccgctcgttttgatcatggggttaacgacgacaatcaccgctttcttcctcatcatgcgggatcgaaaaaaaacgaaggcccccctctccttggacagctccggttctttggacacaagtatgtatctgccgaaaaacctcagggtgatcctggcggttttcataccgcttgtgtttctcgccgatattatctgtatgatcgtataccgcctgcaaggaaacgatgcgacggcactcgtcggaggaaccgcgatcggcattctcctgatcattcatttcattgtatataaagagcggcatttagaaaagatcaccgagtattttatcggcggttttcaattcggctttaaagtattcggccccgtcattccgatcgcggccttcttttatctcggtgacgcggggtttaaaagtattttgaacaccccgctgccgaaaggatctgcggggatcgtcaatgacctcggattggccctgtcccattcttttccgatgtccggagaatttgccggcatcgccctgaccgcagtcggtgcgattaccgggctcgacgggtcagggttttccggtatatctcttgcaggctcgatggcaaagctgttttccgccgcgcttcatacggacccggccgttttaacggcgctgggccaaatttcagcgatctgggtcgggggcggaacattggtcccttgggcactgatccccgctgcggctatttgtaaagttgatccgtttgagcttgccaggaaaaactttatcccggttgcggccgggctagtcgtcacaacgatcgccgccatcatcattctcccgtagcaaaaggattgaaatcttctgacattttctatacaatcatgggaaaagcagacgaggggggcatcgcttttgacgttaacgacacttcaaaaaagcttaaacgctcagcttgacgggctgtatgaggaaatggttgaaatcaggcgtcaccttcacatgaatcccgagccatcctttaaggagaaaaaaacaccggcgttcatcgcctcattttatgaaaagctcggcgttcccatccggacgaatgtcgggggaaacggtgtcacagcctatattgaaggcggtgaaccgggaccggtcgtggcactcagagctgattttgacgctttgccgatacaggatgaaaaagatgtgccctatgcttcacaaattcccggcgtcatgcacgcctgcgggcatgacggccatacggcggctctgctcgcggtcggaaaagtactgtactgcaaccgggaaaaactgaaagggtcatttgtgatgatccaccagcacgccgaggaattatctcccggcggagcaaaagcaatgattgaggatgggtgcctcgagcatgtcgatgccattttcggcactcacctttgggcgactgaacccgtcgggacggtcttatgccgcccgggcgcagtaatggccgccgctgacggctttacgattaaagtcatcggcaaaggcggccacggcgcgattcctcacgatacgaaggacgccgttttaatcggctcacaaatcatcacggctcttcagcatatcgtcagccggcgggtaaatccggtgcagccggccgtcatctcagccggctcgttcaccgctgaaaatccgtttaatgcgattgccgatcaggcagtcatatcaggcaccgtccgctcgtttgacgaaagtgtgcgcagcctgctcgaagcagaaatagaagccgtcgtaaaaggaatctgttccatgcactccgcttcctatgaatatcgtttcaagcgcggttatcccgccgtcgttaatcatcctgaggaagcggcgcacgcggcggcagccgcagcggaaacagacggcgtcacgaaggtcattgaaggagagccgcagatggccggagaggatttttcctattatctgcagcatacaaaaggcgcatttttctttacgggcgccgctttagaaaacccggaaaccatttatcctcatcatcatccgaaatttgattttaatgaaaaagcgatgctgacggccgccaaagtgcttatcggcgccgcggtgagctacccccgatagggcataaaaaacagccggtacattacgtaccggctgctgtgattcttaaatgaaaaacgtgccttgccgtctcaccgagctgtgacagcagtttataattggccgctccgcccacggcggctccgacgaccggcaaaagctgaaacaatttcaccacgtccagataatcgcggtattcctgctgaaaaactctccaatcgacatcatgctttttcgaatcccactgttcaatcattgagtatatgcgtttccgctgttcaccgcttgagaaagccagctgaaaaataaacagcaaaaacaatcgttcatccctgtctttcacatcatagccgtaaatagaggcaagatcgaacagacatttcattttaatggataacagcaaaggaaaatcagccatccctaaaaaaattccgccggcccccgtaccgatcccttcggctgccgcgaccttttggtacgatgcgatggtttgtctggcgagggcatctttttcagcaagcgtcataccgtttgtatcccgcttgcctttcaccagatttgaacccgccattgttgcttcggtcatttttttaatgctttctgtgatgacggcatgaattttatcgggaatccgctcatttattttcgcctgcattcctttagaaaaacgttcaagcatggaatctttgcgcaaaaaacgcactttccattgcagtgcttcctgtatcagctgctgatcgtcggtcatctgtgtctccttctttcattgaggtttcaaaaacccgattgattacagcttgccgtactttttcaatcttccgcccatatacgaaggcatgatcacaaaaatcagaacggctgaagcaacagccgcatacagcgccccgctgactcccgcggcataggctgacgctgcacagaacagcagcgcctgcacggttaatgccgatttcatcagcgaaaagaaactttgcagcttcgctttctgattgaccgggtaaagctcctgcagagaaagatgatgaaaatgcccgaacagcggcagaagctgtattcccgtaataaagacggtaaatacggttaacgccgccgttatccacggattggcggaaacgagcataataatcaggataaaaataatcgtgagcctgacctgaatgcctagataatcatttgaacgcagaaaggcccgcgcatacatataggagaacgttttccgctgttcgaacggaatcattctgagcaaaaagtcgagatacgcccggcgttttgcctgttttttcaggtgaggcacatcggtaaacagattggcgattctgtaaaaccgctgcttccttcttaattcatattcaatatgggcttcccattttaatgatttatgttttgcggccgatgtgaaatacacataaaggccggccatcacaatgtagacggcggcagcgtacacataaaacgactgtaagacgaagtataaaagcagcatattgcagataaagcgtatgaccgcatccatcattttcatgcttctgtcattcataaacgtcatccgccactccatggcctgattccacgcttttaccgccagcatctgaataaatacggcggcatacgacgcaagcgacgcccccggacttacagcgaaaaacagaggcatgcatacaagcgacagagcaataagcggaaacagctgtgacagatagctgtacttaaatgaatgcttaaagtatgtccccattttcggttcaagcggcagcagaaacacgaggtccgcttcctttaacagcgtccggacgtatgaaccggtcagcacaaatgaaaagagcaccgccatcacccaaaatgacggaaaatgaacgggaatgtctttgacccacttgctgtaccagcttgccgcgccggcaataaaaaagatcagcacaatgacgagatgatcattgagcatatatttcatatacattctggtttcctttatatgctcttcaagccgggactgccaaatcgtagacatattattcatggccggcgtcttccttcgtcagttcgatatacaagtcatcaagagctgcgtctttcatgccgaactgctctctcagttcttccagtgtgccgcttgcccgcacttcgccgttatgtaaaataatgaaagcgtcacagtagcgctctgccgtagccaggatatgcgttgacatcagcacgcttgatccggcttttttcgcggcgtccatccgctccagcaatgcattgatcgcaagcgggtcaaggccgagaaacggctcgtcaatgatataaagcgaaggctccgcgagaaacgcgcacatgatcatgactttctgtttcatccctttggaaaagtgagcgggaaaccatttcagccttttttccattctgaattctttcagaagcggaggaagccttttttcaagcgtttctttggaaaggccgtacgccatggccgtcagctccagatgctctttgagcgtcagttcttcatacagcaccggcgtttcggggatgtacgtaaattgcgagcggtagctttccttatcctccgaaaacgtcttgccgttcagctcgatcgagcctttatgcgggtccattaacccgataatatgccggatcgtcgtgcttttgcccgcgccgtttaatccgatgagtccgacaatctggttcggctcaagggtgaatgaaacattttttaagaccgggtttctcgtataaccgccggttaagtcttttaccgatagcagagacataatttctccccttctgattcgtttttcttcatagtaccaaaaataaagtctgatttgaaacgattccctttttttctcacgtgaaaagtgtgcatagttatcgttttggcggacatcataatgtatgtagaaggaaacagctttaatcaactgaaaatgaggtgtttataaaagacgtcttagaacagttggatgaaaatcaacatgtcctgtgcttacaatttcttcacacactgctttgatgatgttcttcattcatgatgaaataatcaaatgaggtgtttgtcccaggaatgattaagcagacccataagtcttcattttaaaaacaaatgaggtgcttacaaaaggcatattcaattttctgtgataaagctcgtacttctgcatcagggtgaacgcgcagccgttcatcctgttttttgttttggccgtttttgtggtacgatgagaatatacatatatttcttttcagggaggaaacccatctatgcacaaagcggacgattgtattttctgcaaaatcattgccggtgacattccgtcttcaaaagtatacgaaaatgaacacgtcgtggcgtttcttgatatcagccaggtcacaaaaggccatacgctcgtgattccgaaaacacatatcgaaaacgtgtacgagtttacgcctgagctttctaaagaatattttgaagcggtgccgaaaatcgcacgcgccatccgcgatgaattcgagccgatcgggctgaatattctcaataacaacggtgaaaaagcgggccaatcggtgttccattttcacatgcatatcattccgcgttacggaaaaggcgacggtttcggggctgtctggaagacccacgccgaagactatacgcctgacgatcttcaggagatagcttcaaccgtcagaaaacggcttgcctcatcttaaagatgaggtttttttgcgtccggaaacacaaaaaacataaattatatttttttatatcaaaaaaatcaaaaaattgtgataggataattgtattatttcttacactaaagcggaaaacagggagagatcgtaaacatggaacgtacaacgaatttcaatgcaggacccgcagcccttccactggatgtgctgcaaaaagcacaaaaagaatttgtcaacttcaatgataccggcatgtccgtcatggagctgtcccaccggagcaaagaatatgacgcggtgcaccaaaaagccaaaagccttctgaaagaactgatggatattcccgacgattatgatattttatttcttcaaggcggcgcaagccttcaattctccatgctgccgatgaactttttaacgccggaaaaaacggcgcacttcatcgtaacgggcgcatggtctgaaaaagcactcgccgaggcgaaactgttcggaaacacatccgtcacggcatcaagcgcagattcaaaccacaaccacataccggaagcgggcctctcaggaatcaaagacggcgcctacctgcatattacgtcaaacaacacgattttcggaacgcagtggaaagagttcccgaattcaccaatcccgctcgtagccgacatgtcaagcgacatcctgagcagaaaaattgatgtcaaaacgtttgatgtcatctatggcggagcccagaaaaacctcggtccgtccggcgtcacggtcgtcatcatgaaaaaatcatggcttgaaaacgaaaacgccaacgtccctaaaatgttgaaatactccacccatacaaaagccgattcactttataatacgccgcctacatttgcgatttatatgctgagcctcgtccttgaatggctggctgaaaacggaggtgtcgaagcggctgaacggcgcaatcaggaaaaggccgacatcctgtacggcacaatcgacgcaagcggcgggttttacgcggggcatgccgcaaaagacagccgttctcacatgaacgtcacgttcaccctccgcgacagcagtctcacgaaaaaattcgttgaagaagcgaaagcggctaaaatgaccggactcggaggccaccgctcagtcggaggctgcagggcgtctatctacaacgccgtcagcctggctgattgtgaaaaactggctcagtttatgagaaagttccagcaggaaaacgaataaatttcttctaacataacggttcctttgatatactgtttgcatatcaatttttccggccatcgcaataaatgacgagcatattattggatggcgaaaaagcttagcagaggagagcttagtatgaaaacaaaagaattagtcattatggccctgtttgcggcaatcggagcggtgcttcattccattatgccgccggtattattcggaatgaaacccgatatgatgcttgtgatgatgtttatgggtattctgttattcccccgtgtgcagaacgtgctgatgatcgggattgtaacgggaatcatttccgcactcacgacatcttttccgggcggacagcttccgaatatcattgaaaaaccggtaacggcgtttctgtttctcgcgctggcgcttttggtgaaaaagagcgtgaaaacagcgcccgccgccgtcattacgatagccggcaccttcatctccggtttgctctttttggcgctggcccttctgattgtcggcctgccgggcggattcaccgcattggtgctcgcggtcgtccttccggcggctgcgctgaatacgatcgccattatcattatgcatccgattgtgcagacgatcttaaaacggtccaatatgattgaaacggtgaaataaccgcataccgaaacctcttccggccggaagaggttttttaatgtgtttcagcatgttttatacgagaagttttgtgaaaaaaataaggaacaatgcgagggcggttcctgctgagcagacgatggccttttggcggacgacccgcttcggcggataagaagcggcctggccgagcagtttcaggtaataaacggcgcccgccgcaaagacaagagccatacaagataaaacaatcataaagacagacaaccttctccctccttttcccttaaaaaatatgctaaaataaagcaagctatgtatagaagtttattcttctgaacaaaaatgataaaagttatgagaaaaaaaacggggtgatttcaaatggctgacggacgttcccttttaacaggccttttcgtaggcggattgatcggaggcgcagcggtgttactctcggctccttcatccggaaaagagctgcggggcaaaatcaaagagaattgcaattcaattgaggacacaatcaaacggttaaaaaaagacggaatggcgcttaaggaccagcttgtccaaacggcgaaagaaagcgcagaagtcattaaagacgtaggcggagagcttcagaccagcattaaaaggtggcaggaggaaatcaaaccgcaccagcaggatctccagaaggaaatcgctgatattgaagagaaaatcagacagctggagaaaaccttacaaaactaatatcctatacaaccaaaaaaagtgcggacatattgcgttccgcacttttttttgcggtttaaagcctttcccagcaacggatcaagaatttattataaaattcttaaattttcatctttattaatctttattttattggcataatagaggaaaagaaaatgtgaagcaggtgatctgtattgaatcgtgttgaaccgccttacgatctaaaagaagctttaatctatacccaaaaaatggcgcagctgtccaaagcgctctggaaatctatcgagaaagactggcagaattggctgaagccgtacgaccttaatattaatgagcatcatatattatggattgcctatcagcttaaaggagcttctatttcagaaatcgccaaattcggcgttatgcacgtatcaactgcatttaacttttcaaaaaagcttgaagaacggggatatctgaaattttccaagcggctgaatgataaacggaacacgtacattcagttaacagaagaaggggaaaatgtattcgaaagcctgcttgaggagtttgatccgtcgagaaacgctgtgtttaaaggctcacagccgatctaccacttattcgggaagtttcctgaggttgaagaattaacctgtgtcatccgccacatttacggcgaagattttatggagatattcgagaaatcattgacaaacataaacaatgattttgatagtgaagacggaaggctgaagaaaaaaacggacgaatcggctgtccatgaaacggctgaagagctggaaccgatcaacagttaatcaaagtgcttcataatctcaataaattcttccatcagcgctgtataaagcccctgctcatacagagcaaaaatcgtttcatgaacatctaatttttcgttcagctgtcccgcaaaaagcgcaaggagcttgtcaaacgtcacaaagccttgcgctttttgcgactccagctcgtcctccaattcgcggcagatccgcccgacctcttctccttcttcttcggtcagccctttttcaatcatcatcgcataaaaagggtacttatccatatccaccgttttcaccagcaattgtatgtaatattctaaacgcccgatacgctgatccattgaatccatccgtttcacttctttctatctttaatcttattttagctgataatgaatggagaagaaaggttaaaccgtacatttccatgtttcaccgagctcttctgttcttctctttccaggtttatttttttctttaaaaaaggattgattttttctcctgaagagagtaaattattttgagattgtattccatctttgtacggaaggatgactctgatgaattgctggaaaaccattaatctgatcaaagattatggtgcggttcgtttattattgactgctgtaggttttatgatcctgttttttatatgcaacttcttggcattcgggctgctgcgtccgaatatcagtttaagtgacgggcacgtgtttgctttttgtgttctgctcgttgttactttatttgtacataaagtcatacatgtcctgccgatgatctgtaaaaaaagaaaaaaggaaatgaaaatgtacttcttgcggatgccgacatggaaaggcataccgaaaacgacgatgctgatttcaacgatcagcccgtttttattcattacgccgttattgttttatgccggactggcatttccgagacacgctcattacttttatatgatttcgagcatccatgcggggtattgcctgcctgatcttctgtttgccctgcatctggtcaaagcgcccaaatcatgtctgattgaccaggaatccgacggttttgatattttagtaaaaaaagtgccggagtcttgatgtcccgctgatttttcaggttacattctatcttttttaataaatatttggtaatgtaatatgggagcagttcagagagagggggaatctcccatcattttattctattttatcgtggctgccctgtttattctttatttcataaacaggctcacaaatacattatgccttgtcagagagattcctgaagaccggcaggataaggtattccgttttattaatgtatctattttaattttactgatctcttcattcgtcgagatctcctttactgtgtaaacaggcaaaaaaatatggctgacggaggtctgacccccgacagccatatttttttcttaataaagccaagaagcgccgatgatgatcaataagatgaacagaacaaccaataatgcaaaaccgcctgcaaatacttcacccatctccaaaagcacctcctacaaaacgttttatttttccaattacatcatatgcaatttactactgaaacgattaggcgcccgggtaagaaaacggaccgcttttagaaaaagcgatccgtttcgcttaacaaatgtaagctgcacctacgatgataagcaatatgaacagtactacgagcagtgcgaaaccgtttgaatatcctccgcccatggttcattacctccttttcatgatcaatatatttgtatgtatcaggaaaaagtttgactagacgaatgccctttatttaaaatctttttacagaaagccacaatatgttatgatacgcatatgcaatttaatttggatgattaggagtgtttaaaggaatgaagaaaatcgcgatagcagctattacggcaacgagcgtcctggctctcagcgcttgcagcagcggcgacaatgacgtgattgccaagacggatgccggaaatgtaacaaaaggcgagctctacacgaacatgaaaaaaaccgcgggcgcaagtgtgctgacacagctcgtacaagaaaaagtattagcaaaaaaatacaaagtatcggataaagaaatcgataccaagctgaaagagtacaaaacgcagctcggcgatcagtacagcgcccttaaacagcagtacggcgaagattacctgaaagatcaggtgaagtacgaactgcttgcacaaaaagcggcgaaagacaacatcaaagtgactgactccgatacgaaagaatattacgacggcttaaaaggtaaaatccgcgcgagccacatccttgtcactgacaaaaagacagctgacgaagtggagaaaaagctgaaaaaaggcgagaagtttgaaacgcttgcgaaagaatattcaactgacaactcaaaagacaacggcggcgaccttggctggttcgataaaaagtcaatggatgaaacattcagcaaagctgcattcggcctgaaagtcggacaagtcagcgatccggtcaaaacaaaattcggttatcatatcatcaaaaagacagaagaacgcggcaaatatgatgacatgaaaaaagaactgaaagaagaagttcttaaacagaaattaaacgacaactcagctgtacaggcggcaattcaaaaagtcatgaaaaaagctgacgtaaaagtggaagacaaagacttaaaagacacgtttaacacttcaacttcttctgaatctaaataaaaaaactgtgcgggctctcggcgagccgcacagtttttttatgcgatcgaatgattggagttttcttccgcatccccgttttcacttgcgggcgccgccatacggcgttcgcgttcctgttccatccgttcaatatacacccttccttctttttcaataaacgactgatccagcttttcctcttctttagctgttgtgaaaagcttataagcgctgaaaataattccgataatgcaaaggtatacccaccaaggaaaaaatagcacgtcggtttcctcccttttttacccagagtctttattctaagctatgcttgataaagacaagttatgagagctgaacgtaaaaaagaccgatcatagagaatcggtcttttttatcttattggtggaaagtcggtttgtagaaagaacggttttcaagcgcaaatacacgctctgtgtattcgcccggcttcacccgttccagcgctctgtccatcatgatcatttttgcatccagattgtcaatgtagtgcagaatttccgcttctttcaccatcggcggtttcgggcttccccattccgcttttccgtgatggcttaaaatcaaatgcttcagaatcagcacttcttcagcgtcaatctgaagctcttcggctgcttttgaaagctctgtcaccatgatcgaaatgtgcccgagcagattcccttccacggtgtacgttgtggagacggggcctgaaagctcttttactttgccgagatcatgcagaatgactccggcataaagtaaatcccggtcaagagacggatacagatcggctatcgcttttgccaggttcagcatggacactacatgatacgcgagccctgaaacgaactcatggtggtttttagccgccgccgggtaatccataaactcagccgcatattttttgaccagatgtcttgtgatccgctggatgtttggatttttcatttcaaaaatgtattgagtgacggtttccatcatttcatttttcggaatcggcgccgtttccagaaaatcatcaatgctgacattttcgttctcgccggccggccggatgtttctcagcttaagctggtttcgtccgcgatagtgatggacatctccgatcaccttcacgatcgtctgcgccgcgtacgttacttcatcagtcggcttggcatcccacagcttcgcttcgatatctcccgattggtcctgcagcattaacgtcaggaatggttttccgttgcttgcgattcccttagtcgaagatttaatcagaaagtattgatcgacctgctcgccgacctcgtgcagcataataccttttgccattctattaaaagctccctccatatcttacataataccagtatagcacatacctcttttttgaaaataaactcttttatgacaggagccgcatgacttgtccgctgtgaaaagaccggctgacatgctcatggcaggtgaaataaagtatctgccgcccgccttctgaaagctgattcagcacatcaaacagccgctgcagccgctgcctgtcaaaatggacaaaactgtcatcaagtaaaaacggcagtgataccgcagattccctctctgacgcaagggcaaaacgaatcgccgcataaagctgctcgcatgccgcctgtgacagttcgcctgcagaaaacaccgttccgtctttccgcatgaccataatggaatcatcagcctcggaaaaatacaatttgtgatagcgcccgtccgtaagcggtccgtataatgcaccggcggtttctaacagacggggaagcgtcacttttttatgccgctccattttttccctgataatgtgtctgaccgtctgtaatgcggcccactctttagcggtttttttcacgcgctccttctgcatttctgtctgctgttttaaatcggatacaagccccgaggactccagctgctcttgcttcaccgttaataaagcggtttgctcacggagctgggcgcttttttcctcaagtgtttttttctctgtttccttctgaacgactgtatgttcaagttcggacactgtgcggctcatgtacggctccagctgttttccgcctatgccggacaagtgcgttttgatttcgcgcagctgccgctctgtttcccggcggctttcattcagcctggcgagttcacaaaagtgttcgcggttttttgcgcctgccgccatgaaaagctgtttgacctgctgttcgtagtaatgaacttcttcgtttaattcacgcatttgctcttgtgcatgcagcagatccgtttcgagcgcctgctttcgttttgcttcctcacgggccctttccgcctgcgccagcaaaacgtgcagtctttctcttacggacagctcccttccgtctgaaggactcagctttttgacccggtcctcaaatgctctttgcagcttttgcagccggcccgcttcaatggtcagctcatgcttgttaaggatttcttttttgacatctttcatcacatgatatgcgtcaagaagatgggaaggacttcctgaaaaccccagttcattcataaaaagttccgcctgtttttcagacggcgccatttcggcctcccattcttcatattggcggatgactctttcatatgccgcttctttctgttcaagcacggcttgatccgcaatcagctgctgccggtgccggccgtcacgccaaagctcttcctgcagaaaatcagccgcttctttagagatcgccggcttctttttcttgtgtccgggccctcctctttctgacggcagcggtttttgcatgccggacagcatatacagcagcagagcaccggtaaaaaaggcggcgggcagccattcctttaacatagcgaaaatcgcaatgaacagaatgcccgcaccgagaaagagctttttttgtttggcgcgctgtttttccagctgctgaacatgtgcctgccattcgtttccttctgtatcagccgtttgcttatatgattgtaaagcggcttctttttctttcctgacagcggggtccaaaatgttttccgccgtcaaggcatgttttcgttcggcttcttccagctccagccgcgcttgttcgaaaatcgcatcaagctgtgtctttctttctcttgcctgtccggcgctctgcacggcttcctgcagccgccattcatattcataatcggtgttcagtgaaagaatgccgtcttcctcatgtcttccgagctgctgcaatcctgacgaaacgcgggcagatgtctgccggatctgtgattggatggctgcaagctgttcgccgcgcgattcatacatatgctgctcgccggaaagctcctgcagctgccgctctttttgcagcaagtcctcatttggagcgagcagatcagcctgccgcctgagttcagccgcttttgcccgaagcccctcaagacgggccgctttcggatggagatgcgattcgtatttttcaagctgatgcattccatccttcgggaattgcttcaatgcttccggataagaagaaagttcgctttccaaggctgtttttttgtctgcgagcggctttgcttctatcgccgattttactgttttgatttcttcagttatgtctttcaatcgtgcttcggcatcctgcaaacggccgccggcgctttttttctcttccagaaggctgtgatagcccgcttccgcagcttccgcctgtttcagctgggcgctgagccgctttaatgtatccaactcctgatttaagcgggggttccgcccgttcggcttatacatcctgtcaagttcttttgccagtcgcccgtcaagctttgccgccgcttctgacccgaataagctcgaatacaggagaaactcgccgattttgtcccggttaaaagcttgaatctcctgcagtccgaatacatcgaacgaatagatcgcttcgtacagcgcccgatctgtatcggaaagaagctgtttgagacattctccgtccttgatttcgcctgaagccgtatacactctgactttttcggcagcgccttttgtccgttcgattttgacagcgccgtgatcgccatgcttcaattccacagtgccgccgtaaaccccgccgtttttcggttcgtatttttttgatttcggaaaaccgaacagcacgcttttgataaaggacatcaatgtcgttttacccgcttcatttaacccgtagatcacttgcacgggagaatctgacaactgaaaacttcggtcggaaaattttccgtattggtaaatatgcatcgccgttattttcatcgctgaagctccttcatttggcgtcttaaaacggcttgagcctgccgcttaatatccagtatctcttcatctgtaaatgaagccatctgacgccggtatacgggatgacgctcaagggcttcaaatacaccgctcatgtccgcgcattgttctatgtcctgaaggagccctttaaaaaacggatcgggcggcacggtgtctgtttcatccgtccgatcctcaagcgcaagcggccagacgaaacattcctcttcggcctcttcctcctgtaaagcggaaagaagctcctccgcgatgcctgcgggcgcctccgtccaaaagcggggcgctgcgccgcgaagcaccagcctgacacatgccgggcggcccgccgcgcgcaagccggagaatgtatccgatgcggttttcagaagtgaagtcatatgttcagcttcggagatatcaagatcaatttcctcccataacacatcatgcgcttctttgaattcccaagacatctcaccgtttgccgcccggacgagataatatcccttaggcccggtttcttttaaatgccgggcttgaatattcccggggtaaatggcggcgggatgccgggcggacagaacctgccgtttatgaatgtgtccgagcgcccagtaatccatgccgcttttttcaaggtcttctttcgtaaacgggcagtacgggtcatgcccttccgctcctgataacatgccgtggagcatgccgatatgataaggcgcgccggtcactttccggtaacgggccgcctgattgaccgttacgcttctgtcctgatagctgcatccgtatatgcttgccgcaagctctccgtttttaaagaaagatttttcctccggtgtatccgaggtgaagatatgtacattttccggccattcaatcggcgtccacttaccgcccaaatgatcatggttgccgaatatgacgaacacttggatatccgcttcctgtaatctcgtaaactgttttctcaaaaacagctgggcttttaaacttctgttggcttcgtcaaacagatcccccgaaagcagcacgaaatctgcctgctcccggagtgccccgtccgtcagacggcggacgctgtgaaatgtgctttctttaatacgcgcatataccggttcaggcagattcgaaatgccgtaaaacgggctgtccagatgcaggtcagcggcatgaataaacgtcagatcagtcatctcgccctcccctttctgcaaattgaattacccttattttagcaccgtttttatacgaatgcacgttctgcaaaataaaaaaacagcccggctgttccgggctgtttctcttattttttggagatgcgcagcgcttgtttaatcgctttgaatccgctggcgtttccgtaaatcaatacgccgcctttgtaaattttcgcgccgaccgccgcaaagatcacgatagtgaccagtgtcagggcgattccggccgcagcctgccaaaacgggatatcgagcatcccgacgcgtaaaaacataatcatcggcgtgaaaaacggaatgtaagatgtaacggtaataaaaccggcgtcaggattgccgatgccgaacatggcgatcataaaacctgccacgactaaaaaaaccatcggctgaatcgtctgctgtacgtcctctatccggctgacaacactgccgagaaacgcggcaagcgtcgcgtaaagaaaatagccgagcaaatagaaaatgacggcatagactatcgtcgagactggaacatccgtaaagttgagaaatgcactgatcggcgacgacgcctcattatgagggttcagcttcagtgagagataacccgccgcaatcagcaccccaaactgtgtgatccccacgagcgcgataccgaacagtttggcaaacatctgctgaatcggcggcatgcttgaaattaaaatttccatgacccgtgacgatttttccgtcgccacttccatcgcaatcatgcttgcgtacatgataactgagaagtagatgacaaacagcatgatgtatacaagccccattacctgaccgagctcttcctcagatttcgcccctttttccagcgcgtctttgctgacttccggcggagtgtagaggctgctgactttttctgccgaaatgccgagcttggcggtttcgacagcggtttttgtctgggttaaagcctgcttgagcagtttatacgctgattcatcggaaatggtcagcgccttgtatgctcctgttatcgttcctttttgatcttgtctgatgataaacagtccgtcccattcaccgtctttgactcgctttacggcatctttttcggactccttcgtctccattgcctgcagatcattgtctgtatccgccgctttaagctgttttgcaaacgccgggtacagcccgcccgtttcatcaatcaccgcaatttgctgcttgccgtcatccgattgaaacacggatataatcgattgcaggttggtcaccgctaatactaataaaacggtaatggcggtcgaaataatgaatgactttgtcgcgattttgtttttatatgtatgaaacagcataatccaaaatttattcatatacggcccccaccttttctataaaaatatcatgcagtgacggctcttccaattcgaacttccgtataaaacctttcccttgcagcgcccggaaaatatcctgagaaaccggttcattcgcgacctgcagtctgatcccgtcatttgtttccttccatttcacgacaccttcatgcgtttttaaaaagctgaggtcatcatctgaatgaacggtgacattttttttgccgaaagaccgcttaatgtctttcagattgccttgaacgacgggttttcccttctggagaatgcacaaattctcacaaagttcttccacatgctccattcggtggcttgaaaaaacgatggaaacgccgctgtttttcaaagaaataaccgcttctttcagcagctcgacattcaccggatcaagaccgctgaaaggttcatcgagaatcagcagttcaggcttatgcaggacggccgaaatgaactggattttctgctggtttcctttagacagctcttcgactttcttattcttgtaatctgtaatgccgaaccgctcgagccatgtcatgagctctttttccgcctcttttttgcccattccttttaatctcgccaaatagacaagctggtcactcaccttcactttcggatacagcccccgctcttccgggagatagccgattttttcactgatggaataattgaccggctgccctttccaggtgatatgcccgtcagtcaggcttaaaagacctaaaatcatccgaaaggtcgtcgtttttcccgcgccgtttgcgccgagcagcccgaacatttccctttcaggtatttgcaggttcaaattgtcaacagcggtaaagctgccgaatgttttcgttacgttttcaattgtaagcacgaatccaactccttccttgacccattatatactaataatgggtaaaaattaatggaggattttaaattctttatcagaatatcattctataaagggggtgacatgatgggacaatatgtattgaccgcattccatgcgtcgggagaaacgctgctggatgaacggatcgaagcggataatgaggcggaggcgaaggccgccggagaggctttgttaaaggaaaaaaaacttgagaacagtactcatcgcttggtaaatgaagccggaaagctgattttattccacagataacagaagctttccggcttctgtattttaccggttaaattgcggcgtccgtttttctaaaaaggcgcggatgccctctttatgatcatccgtttttctcatattttcctgggcctttcgttcaagagacaaaacatcttttaaccggctgatatggaggctctgataaatagccttcgtttcaatcatcgctgacagcggcgcatgcagcaatcggtcgatatacggttgtgccccctccgcagggccgccgctgaacagcccgtcggcaagcttgagccgcaccgctttttcagccggcaatttttcaccgctccaaatcagttttttcgcttcgatctcaccgacgcgtctcattaataaataatggcctcctccgtcggggaccaatccgatgccgatgaaattcatcgcgagtcgggcgttttcttcagcgagcaccacatcggcgcacagcgcgaaactcagtccgagccccgccgcggctccgtggatggcggctatcacaatttttttcatatcatagagcgtcaacgtaatggattcgatcattttcatgagccgttcatattctcctgaatcatgatcagacgtcatcatctggatatcaccgcccgcagaaaatccccggccttccccccgcaagaggacgataagcgcttcgctgtcggctgccatcacgcatgcattttccaattcccggagcatttgttcattcagcgcgttgtaactgtcaggccggttcagcacaatctctgcgatctttcccttttcttcataacgaatatactgcatgtttacaccctccttgtatccgcttacatattttgttcaaatgatatattccttccgccgaagcgaaactcctttatttttcaaggtcaacagataccgaaaaatgcatatcatttgaaactgaacatacatttttatatagtgaaattgatatacaaaacaaaaggggggaaaacaccgataatgaaatatgtgatactcagcttgttactgagcttttttatggtgctgttccccccttcggatgtcgctcttccttcccaattggtgacagaaacagacagccatgtacaaatttcggtttacccgcaggaaacggagtcggcaaagacgccggttcaaaccaaaaccgctccgcaaggcctgtcaaaaggatacggtgcgttatcccggatgatctccctgttatctgtcaaacctcttgatcaattcattgattccacaatggaaaggacatgcgccattccgatacaataccagtcaaattacctccggcatcagacaatttctcattgccaatctgtatttacgatgtaaaaacagtatattccggagggattttttatgaatattaaagaaaacgatctgcccggcatcgggaaaaaattcgaaatcgaaacgagaaatcatgaaaaaatgacgatcatcattcatgatgacggcaggcgggaaatttacagatttgatgaccgcgaccctgatgagcttctggcaagcatttcacttgatgatgcggaagcaagacagattgccgcgattatcggcggtatggtgtataaaccgcaggcgcttgaatcgattgaaatggcgttcaacgatctgattatcgaatggtttaaagttgaaaaaggggcaaaagcggcagggcggacgctcggcgaactggatgtgcgtcagaactatgacgtgacggtcatcgccatcattaagcataaccggaaaaagcttttaaacccgggcgctgattcgctccttgaagcaaacgatacactcgtcctctcaggtgaaagaaagcatctgaaaaagctgatccaagacttcctctccagagacggagtgtgatctgtttatggaccatctcgtatttgaagtcggtacggcgttagttcttgtagccattgcgagtgtcatcgccaataaaattaaattctcgatcatccccttcctgatcattttaggaatgcttgtcgggccgcacgcgccccaagcgggcatcattgacttgacgtttattgaaagccgggaagtgattgaatttttcggacggatgggcgtcctgttcctcctcttttacctcgggcttgaattctcggtcggaaaattagtcaaatccggacgttcaatcgccgccggcggaacgatttatattctgattaatttcagtttagggctgatctacggctttatcacgggcttttcctttttggaagtgcttgtattggcaggcgtcatcacgatatcatcaagcgccattgtcgcaaaggtgcttgtcgacttaaagcgcacggccaatccggaaacggagctgattctcggcatcattatgtttgaggatatctttctggcggtttacttgtccgtcgtctccgggcttgttctgggagacgcgacgtctgtcggaggcgcgctgatgtcaatcgtgatcgctttcggatatatgctgctgtttttcattgccgcccgaaaattgccgcctctgctgaacaagctgcttgatatccgttcaaacgaggtatttgtcatcgtcattttcgccgcgctctttttcattgccggcttttccgaaacgattcatgtcgctgaagcgatcggcgcgctcttgctcggactcgtgttttcggagacggcccattctgacaggattgagcatcttgtcgtgccgttccgtgactttttcggggccatgtttttcttcagcttcggtctcagcattgatccgttttcactcggagatgcggtatggcttgccctcggcgccgttctgctgacgattgccggaaactttatcgccggcatgatcgccggacgccgggcggggctttctcataaagcatcgtctaatatcgggctgaccattgtgtcacgcggcgaattctccattatcgtcgcaaatctcggcatcgccggcggcctgtccgcttcacttaaacctttcgccgccttatatgttttgatactggccatcttcggccctttgctcacgaaagaatcgaagcggatatatctcctgttgaacagcgtgttcaaatggaagacgcctgaaaagaagccgcagaaatcataaaaaaaactgacctcttcataaggggtcagtttttttgagcgggaagaaattgctgaaaagccgtttttttattaatggagaaatgctctttccccagaatggtattgatgattttttggtttctgtaaacagacagcttcaaattcgtagcgcctgttccgtgagcatgatcaagattcgttaatgtgaaaaaatgatgccgcctgtcgtccttaaagataagacgggaatcggccgtcactttaaaccgtttctcatcctcccattcgatatcgggggcaattgccgtaaaccattccggaatatgaggtttaaagccggtcgccaatatcactttttctgaatcggccgtaaaggtttcatccatctgccattgatgaaagctcagtacgcagcgcccattttgcttttcaattttttcaagctccgccatcggctgaatatacacgtcaggcgaacctccgctgatcgatctgtgatacagggcatcgtaaatggcggcaagtgtgtcagaatcaatgccgtggcgcagtccgtccagctcagggagcgtgttcagccgttctttaaaaggcaggcggttaaaatattccacataatcaggtgtaaacatttcctgcccgagcttggcggtttccaattctcgaaatccggcggagcgtgtcacccattgcagccggctgcggcggtattgttcatcgtgcaataagtcagaaaagatctccgcggcgctctgtccggaaccgaccaccgtaattgattcggcgccggcgagctcgtctttccgaaacaaatattccgtgctgaccatcgtgtcctgacgcgcttcgtcagcaatctctgcgggaataagcggctcagaccccgtccccatgacgaaatgcttcgtttgatagacactgatgcttccgtcctcaatgttcttgacgctgacgtcataatgtccgccggcatttttcacaccgattacctctgagccgaaacggcatgatttgatttctgaagccgcccagctcaaatagtcgttaaattcccgtctcggaatatcaaattcattaaacgtataaaaccggtacagccggtcatgttcatggagaaagtttaaaaacgtgtagcggcttttcggatcggcgagcgtgaccaggtccgccagaaacgccacctgtaaatcggtccctttaattaatagaccgggatgccacgcaaattctttctttttatcgaaaaaaagagcatctgttccgggtatatcctctaacaatgcggcaagccctaaattaaacggcccgattcccgctccaatgacatcatacatattatgcacctcttacgaataacagtctgatggtcttttcccgtttttacagacggttaaacataaaaaaaacggcacgctgattccgtgccgtttttgatattataatgcggatttgacgaacatctcatctaagtatttgattttctcttctgtataatgctcgaatcggtcattatatgatttcggatctttcggattggcgaagtgcgtgatttttccggtttccggatgaatgaatttgcttgccgcgccgcagccgataccgataatcgtctgcacttcttccataatcataatgttgtagatgctttcctgaccagggaaggagtagccgacattttcaaggtttccgagaatgtttttctgccggtacaagtagtacggcgtatagccgtgctcttttgtccagcggacggcgtcatccatcatgcgggacacttcctgtctgtcggcaactttatacttatgcttgtttctcgtcatttctgacgcccgtttaaaagaaagcgtatgaacggtcaaagattcaggcatcagcttttccgtttcctcaagactgtgcctgaactcagccgtcccttctcccggcaggccgatgatcaggtccatgttgatattattcatgccgtgtttgcgggaaagatggtatttttcgatggtttcttcaactgtatggtgtctgccgatggccttaagcgtttcgttttcataagattgcgggttgatgctgattctgtcaatcttatacttatttaaaacggcaagcttttcctccgtaatcgtgtcgggacggcccgcttcaacggtaatttccctgatatttgcgacatccggaaaagagcggaccatttcttcatataaaagatccatttcctcagcggtaatgcttgtcggcgtgccgccgccgaaataaatggtcgtcactttgatatcatgccgcttcagccattctccgattttctgcatttcatagtgaagcccccataaaaaggagccgactcttcccgcctgtccttgaatggcataagccggaaacgtgcagtaggcgcacttcgtcgggcagaacggaatgccgatataaatgctgacttcatctttgacccggtacagatcgggaaccgcagcgagctggcggtcgacaatctcctgcatcagattgattttttcatcatggatcagataatcttttttcagatcggcatgcgcctcttcttttgtcaggccgctctgcagctttttatgaagaagtttagtaggcctgatgccggttaagattccccatttttgtgtcatgcccgtatgcgattgaagaagatttaagtagacatatgacagcgtatttttcacctgtttaaatacttctttttcgttccatccggcaagaagcggtttcgtatgatgttccttttcgccggttcctttgatttctccggataccgacacgctgtctgcatcttgagaaatggcaagtgagatgacgagatcagagggttcctccgtttcgccgtatgcaagaacacactcttcaaaaaataaattcgcgatgttttgcagcggacgatgcagcctgtcatccgtgatgccgtctatttttatttgcaatgtgatcaccttatttttcagattcaaaactttctttagtgtacagaaagaacaggctaaaatcaatccgcgaaaaagccgcagaccggcgtttcgcgtctgcggctcttgattacggccttttcatatggaacttatcgagaaagcctttgcggtgctgcatgcggaaatattccttaatcatataggcgactccctgttcatcatttgaccttgtcacccagtccgcttttctttttaattcatttgaggcatttcccatcgcgacgccgagaccggccagctcgatcatcggcagatcatcttcctgatggccgatagctacaacctcttccattgaaagcccgagttcagcggcgaccatcgaaagtccgctttcttttgaaacccctttaggcacgatgttcagtttttctccgttgacgcggatcacatcgacggccgggaatgctttcattatcgtatccgttatatcagcctgcaggccatcttcggcatgcacttcaatgacgggcgctgaaaccggctcatcaaggagcaggtcacttaatgattcgacaaactgcaccggataaaaaatcgggtcagacggatgaatcatcgttttcccgaccagattggagttcactttcttcttgtttccgatcgaatatttttcgtgaagaagccggatattgcatggatagctttccagcacctgaacaatattaaacgtgtgatcttctgatattttcttttcaaaaaacggctcatctattttttcagaaatgtatgcgccgctgtgggtaatcaattttgcattcagctttaatattttcgccactttttgagcagagcgaaaatggcggtttgtgaccagtgtgacgtaaattccttttttcttgacgtattcgatggcatcctttgtcgtctgatgaagtttgccgttggagcgaagaagcgctccgtctatatttaacgccagcatttgttttgacacagagaagtccccctccttgatgactgtacttgtcattaggatatgaccctgtctctttgtttagaacaaccttttctccgcagcaaaaaagcctgcctcaagcagactttgaactgtcgttttgttgggatacgatcgatttgctgccttctccccaatgtgtatttctatttacgaaatatatcaggaaccccttatttgaccgttgatgcgctcgtttcacttactctctgttgctaccccttaacataccaggcagtataggcgaccgtatccttagatcatctgtaagtgtaggcgctttcagagttattatctcaattatattgttaaaaaacaagggtttttttaactaaaaaaatcagagggaatatctgtgctgaatgtatgataaagttgaaagggaacatacattctcatataataaaagaaaaaaagcggtgactgtcatgtctctattaaaagatatttataacgaagaatttgcagaagcacttctgaacagaatcaaatcggcgtatccggcttttgagcgggacaagtgccgggcgctgatgtttcaggaagattggcccggactgacgttaaaacagcggatgcgccggatcacagactctttatatgaaacactgccgaaggattacatacgggcgcttaacgtcttatatgagacagctccccgcttctcagggctcgccgggattatttttcccgattatgtccaacagtacggaacggatcactgggacgaatccatgaaggcgcttcagtatttcactcgtttttccacttccgaatttgcggtccgcccgtatatcaggcttgaccgggagcggatgttcaaagagttcctttcctggacggagcatccggacgaacatgtcagaaggcttgccagcgaaggctcaagaccgcgcctcccatggggaatctccattccggctcttcttgacgatccttctccgattctccctgttctggaccgcttgatgcaggatgactcgttatatgtcagaaaaagcgtggcgaataacctgaatgacatctccaaaacacatccggatcttctgctacagatcgcagccgagcggttcggaagctgtccgcacacgaactggattttgaagcacgcctgcaggacactgttaaaaagaggagacaaacaggcgcttgcggttttcgggtttgaagacgcctcccggatttcattggaacgttttacactgaattcggaaacggccgccatcggaacaagcatacatttttcttttcagatccgctcatccgcccggcaaaaagtcagggttgaatacgcgattgattttgtaaagaaaagggggcaccgcagccgcaaggtgtttaagatgtcggagtccgccatggataacggggacgtaaaaaccttcagcaaacatcattcccttaaagatttaaccacccgcaagcattatcggggaattcacactctgtctatcatcattaacggaacggtaaaaggttcgcttgatttttctgttgaataaaaaaacccctccatttcatagatggaggggtttggagcttattccgggctgccgtaaagctcttcaagaggtttcataatgattttgtttaactcgccgatcagcatgctcatgcgctgttccgcttccatcagctgagaaatcaattcatgctgctgtacgagagcaaccgttttttgtgcctgctctacctcttcctgagtgatttcttcacctgacatctgtttctgctgcagctgcagctgtacattgcggaagttatcaaacatgcgttttgccgattcatctgcgtttacttgatcataaagccctctcagacggctgtattcatcactgtttcgcaaagctttttcaagatcatatgctgcatcataaaaatgaactgccatagtaaccgctcctttcttcctttcggacataccactccactataacagactgcggagcgactttcatcatcggcgtatgttttccttagaaaagaatgacaaacaaagcctgaattgctccgattatcccgccgagcagaccgcctaaatacgttatcatcttaaattctctcttggaaatcgacagcaccatttcctccagccgttcaacaggaaactgatcaacctgctctttgaccacttcctcaagacgcagccgtttcagcacatcctccaaatgagcggcaatactgccgagtgccgcatcaagcagcttcggcgcgtacgttcccgtaatctccccttcataacgggaaatgatgtcaccgagccggcattcgaaaaagggcgcggtttgaagtgcggccaaagcccgctttttcatgctgaacagcagatctttcgcattccacttttcatcggcctcataaagtgtataagatttgagcttgccccattcttgagaaagcagatcagccagaagctttttcgtttcctcattgcgcaaaaactttaacagctcaggcagcacacggtctgccaagcttgaattgccgaggaacatctgcaccatgctgccgagcatcccccgggaattcaaaaagtcgtcaatcatatttccgagcctgtctttcccttcttcgctctcaaaataatcaatgctccgcttcagaatataatctgcggccaacgggactttttcatccagcttttcctgaagctcatcaggaagccagtcttttatggcgcggtgctcatatttccggtacaggtccgaaagcttttcatcggtaaaacggtcaatccaggcatccgtcttttcctgcggattccggatgcccgcggcggccaaagcttcgtgcaccgtcatctcggaagcggccattttttgtgtgaattgttcggcgaaaagaagcgcctggtttttaacggtatctgataaaagccgcttttttattccttccggggttaaaaggtggttcgtcaccatgagccccatttgttttgccaattcatcccgccttttcgggatcagccccggcgtaaacggaatccgttttccgaacaggtaatacggccggtacggacgaaataacatctgaatggcaagatgattcgtcaccgcgccgatcgcggctccgatcacaatcataaatagaaacgttcctgctatgcccattccttttcttctgcctccatcttatgttctattttcttgatgatatatctattcgtattatagaggctggcgtgcatgcgggcaaatgaagaacctgaattgttgtttgtgaggaataaggcaagatgctgtttcgtactctttacagtagatcatcttttatgatgcgcttagcatatttattggatggaagggccgttccatcagcggctttttgaataaagggggagtaataatatgacaacactcggttttatgtctgtatcccgccggcacgaagaagattacgccggggaattggctgaaagagcgcctcaatataatgtgcgcttagcccgctttacaccgtttgatatttttccggattctttgcgcgtgaaagcgctcgtctatcacccgcaaagcggaaagtggaacgaaacggaaatcgatattcccgaatatatttacgaccgctgtttttacggaaaatccgctgaagcgcaaaaagccaaaccgatcgtcgaatggctgaaaaaatatcggaaaacggaatttatcggccgggggcttcctgataaatggacggtcacggatgcgctccaaaagcatcatctgatcagcccctatattcctgaaacggccgaagtaagccgatatgaacaggtgcaatcatacttagccaaggaaaaagcatgtatacttaagcccgctttcggcgcgggaggcagaggcatcatcctgcttgaaacaggcaaaaaatcaattacggccacttactatatcggaaaaaacaaacaaacaaaatcattttccaatcacgtgtcttttaagtcttggtgcaaaaaagtgttgcagcaccgctatttgcttcaatcctacttaaatatccaggataaagaacggcatccgtgcgacatccgcattttcatgcgcaaaacggagtcaggcgtttgggaaacggtcggaaaagcggtcagaaggggctatcagaacggtcttttatctcatttgcccggaggatcagaaccgattaagtttgacacgtggtttgaggaaattccgagaaagcagcaggccgttttattggatgatgtcttttcgatcacccaatccgtcccttatttccttgatgaacggttcggaccgctgtttgagctggggctcgatatttgttatgccaaagacggacgcatctggcttttggatgtcaattcaaagccgggacggaaagctattttaagcgtggctccggaggcgaaagaggatttgtatacgggtccgctgagacgcttccgcgaacttcagtcacaggaaagcaggaaaggagtattaccgcgtgaatcataaagggatgattgtcggcatcgataaaaaaagcaaaaatacgctgtttctcccctcctccatgaaacgggaagggcttttatccgctgccttcgggaccaaggttgttaaatgccgtgtagccttttctcaatcacttgaaaaaagcgcgctcctttctgaagatttgtttgaggagctgttgataccgtataaaagccgggctgactttctcatacacggccaaacggtgcacatcggaccgctgatcggcgttttcacagccgggttcacatcatcgccgtcccgcccgttaagagaccgtacagccttcttttccaagatgctctcacttcatgaacaggcgaacggatattgtttcgttttcggggctcatcagatcaactgggaagaaggcaccgtccaagcgctgatttataaagaaaacagctggaaacggacggccgtcccgcttccgaatgtcgtatatgacaggctcccgagccgaaaaacggaaggagttccgcttttacagcagacaaaacagaggctgatgaatgactatcagattccgtggtttaatccgcaattctttaataaatgggacattcataagcttctggaaaaaaacagcctcaccgcttcacttctgccaaaatctgtcctgcacccgaatgcagaagcgttagagacgttatgcaacacatttgacaccgtctatatcaaacctgcagacggcgcactcggaacggggatttacagggtggaaaaaacagatgccggcttatctgtcaaacacacgaatgaggaaaaaacggtggtgacggcagagtattcagatgcggcatccttcatgaaatcatttaaagaaaacaatgacccgtccgcatttttaattcagcaaggcattgacctgatccggctggatggacgccccgtcgatttcagggtgcacacgaataaaaacgccgagggaaaatggacagtgacggccatcgcggcaaaaatttccggtgaaaacagcatcacgacgcatctggcaaccggcggagaagtcaggacgttagctgaattatacggcgatccgcgcgagagagtcggcatgatgcggaaactttcaaaagccgccttggcggtcagccgcgtgttaaatgagcacattgaaggttttatcggcgaaatcggttttgacctcggcgtcgatcattcagggaaagtttggatgtttgaagccaattcccgccccgggcgcagcattttttcccatccgaagctgagatcggtcgattacctgacaaaacggagaaattttgaatacgcgtcctatttatcagaacggtccatcaccgccccggaaaaactttggcggtgaggctgtctttttttggttttacccgggacaggcacagaatgatgagctacaatgaacaagatcaacatttcccacaaggagcgtgaacgtcatgatttcgcacttcagctggaaaccgttattcaaaaaagagaaactgcccggatggcgaatttcattttactggcagggtacgcattacgaagggatttaccataagtccggtgacattgaatggggacacacacatccgggaaaagaagagccggctctcgtaaaagagctgcatgaattaatgctttatcacatatatgactgaaagctaaaagctcagccgcatcaggctgggcttttctttttccttccgctatttaccacccggttttccgaatgagatgccgtttgattcaccataatacgtagtacaaagcggcaaacagcattgggtgaagccgagctggcaatggttttcattccgagaatcatcggctggtgcaattccagcaaacccaaccatactacttaataaaggagatcatacaaatggcaaacaacaactcttcaaaccaactattagtacccggcgctgctcaagcaatcgaccaaatgaaatacgaaattgcttctgagttcggcgtaaaccttggcggagaaacaacttctcgtgcaaacggttctgtcggaggagaaatcacgaaacgtttagtatctttcgcacagcagaacatgggcggccaaggcgtacaataactcaataaatggcttacagaaggcgcgggataccgcgtcttcttttatgccgtcacccttttttcctatttcacataccctaggaaaaaaggagggaaaacatgtcattcattgcctcagtcaattgggagctgtttcagttcgtaagtgtttctttggtcaatgaatatgttgcccaccatttcccgtttattcacaggcattcttttccccgctgctttgaatgatataatgagcggcgaggaggttttttacatgaacatcgctttactcggagcaacgggaagagtcggacaggcttttataaaagaagcgcagaaacatggacacatggaaatattcgctcttgtcagatcagccggaacagtccttcccattcctgaaaaacagatcataacagggaatgcgaggcggcgggaagatgtaagccgattgatttccaaagcggacacagtcgtgagctgtctcggcacggacggtgacgataccctttcagccgctatgacccatataatagacggcatgaaacggcatcatgttcagcgtctgattacgatcggcaccgcgggtatccttcaatcacggcttatgcctgatcaataccgttttgaatcggcagaatcaaaacgaaaatcaacaagagccgcaaaggaacacgcccgcgtatacgagatgctgctggcagaggatcttgactggacgatcatctgccctacctaccttcctgacggagacgctgccggagtttaccggttcgaacaggatcgccttcctgaagacggcgccgaaatcacagtcggagacacggcgcattttctgtaccgcgagctgatcagcccgcagtttgtcagaaaacgggtaggactggcttactgaatgaaaaaagggcgaatctttttgattcaccctttccgattacaccgcggacttcgccgatcctttctgcaattcatacatttgatggtactgccccttttgcgccattaattcgtcatggcttcccttttcaatgatgcggcccttttccagcacgagaatctggtctgcgtgtctgatcgtggaaagccgatgggcgataataaatgtcgtgcgcccttcttgaacgacttgcagcgctttttgaataactgcttctgtttcggtgtcaatgtgcgccgtcgcctcatccaaaattaaaatggccggatcgaacacaagcgctcttgcaaaagaaatcagctgacgctggcctgaggacagtgtaccgcctttttcagtgacgggctctctgatgcccttcggcaaagattgcagaagacttgcggcgccgacttggcgaagcgcttcttccgcctgctccaaagaaatacgctgatcatcgagggtcacattggagccgatcgtgcccgagaaaagatacgggtcttgcagcacaatgcccatatgcgacctcagctcctgtcttgacatgccgtatatgctttttccgtccagcaggatatcgcctttttcggcatcataaaaacggaacagaagattcaggatggagcttttgccggaccccgtatggccgacgagggcgaccgtctcccctttttcagctgtaaagctgatctgtttcagcacctcttccccctttcgatatccaaaagaaacatcgcggaattccactgtcccttccgcctttctgtctgcgggagcgccttcttcttccgtttcctcctcctgtaaaagctcgaatactctggcggcagagacacgggccaattcaagcttcgaaaattggttgacaatccccgtaaccggctggaacaaacggtttaaataatcaacaaatgcatataaaacaccgatcgaaacaattccggccgcactcagactcgcgcctccgaaataccagatcagcccgacaaacgccagattgcgcaacacattgacaagactgtgggacatgagggaatttaaggacagcattttgttcttatagcgaaaatgagcttcattcaattcttcaaattccttcatcgtttccttttcgcggcggaacgcctgaataatcggcattccttgaatggactcgttcattttcgcattgatgttactgttaatggaacggattttttggttgaagacggatgcgtatttgcggtacacaaccgaccagatcattaaaaacggaataatcagcaggcaaacggcggccagcctgacgtcaagcataaacagcgccgtaaaaatgccgagcatataaacgccgcttgtgataaatgtcgacagcaccgttacatataaatccctgaccgcttctgtgtcattcgtaatgcgggccacgacttttccggcaggcagattatcaaagtagcggatcggcattttctgaatgtgtgaaaatacgtcctgcctcatgcgctgtatgatccggttcgctcccatctgcagcagataatgctggccgtaatgaaaacatacggaaaacatgagcagtcccgcgtaaatggcggtcagcgtcagcaatccttttatttcgggacggtaaaattgaaaaatctcctgtcttgataacgtaatggcgggatatgacctgctttctttaccgtttgatattgtcagccggccgtcagacaccgaacggtttccgtcaaaactgacgggacggtcaacaaaatagtagcccgcaccgacttgataaatgtgcgcctctccggttttgtccgcccccggtttgagccggtcctctctgacataatcatgcccccggaacctgacggcgcccggatcgtccgcagaggctttaacccatgttttttcaatgccgagaatgtggtcgtcaatcattttttttccgataaacgggccggtcagctcagtgccgaccgcaataataagcaggacgaccgcccatatcagcagcttcttatattgaagcgcgtaattccataatcttctcccggtcttcatgcgcccgtccccccttcttcaagagaggacagctgctgcctctcatattgttttcgataccagccgttctgcgccaatagctcccggtgcgtgcctctttcagacacccggccttcatccatgacgagaatgagatctgcgtgttcaactgccgagagccggtgcgtggtgataatcgttgttttatgccggcgctttttacggatgctgtcaatgatggcggcttccgttttcgcgtctacggcagaaagcgaatcatctaatatgagaatgtcaggatcggtcaaaagcgctctcgcaattgagatgcgctgcttttgtccgccagagagcgctacgcccttctcgccgacaagcgtctcaagcccgtcggaaagcatgccgatatcgttttcaaaatgcgcatctttcagcgcgctgccgatttcctcttcgtttgcatcctgccggccgtaaagcagattctcttttacagtcttcgaaaataaaatatgatcctgcggcacatagccgatccacccccggagctcctcaagcggaatctcctgaatcggaacgcctgtaaacgtgattgctcccgcaccgggcggatattcgcgcaacagctgcttaatgatcgtcgtctttccgcttcccgtcttcccgacgatgccgagcgtctgccctttttctacggaaaaagatacatcagaaactgccggtcccgctccgctcggatacgtgaaagtcacttgttcaaaaacaagacgcccgggctccttgatgccggcggggtgcttgggtcctgtcacgtctggctcataggaaagcgtctcattgacacgatccaaggaggcatttccgcgctgcatgatattgattaattctccgatcgcaaacatcggccagatcatcattccgaggtacacgttaaacgataccagctctcccagcgtcagccggttttgaaaaacgagataagcgccgtagccgagaccgatgagatagctgaggccgacgagaagttttacagtcggttcaaaaagtgaatcgataaacgccaccttcatgtttttctcatatacatccgccgtcatatcaccgaaccggctgacatcatttttttcctgtacgaaagcccggatgaccctgacgccggataccgactccagcaccttgtcatttaatgatccgaaagcatcctgcgcttccgtaaaccgctcatggatcttttttccgtacaggctgaccgcagccgccattatcggcaacggaataatcgcggcaaatgtcagcttccagctgatgagaagccccattgtcaaaaatatcgtcagcatatacatcgttgaatcaacgagcgttaagaccccaaagcccgtcgtcatactgacggcctgcaagtcatttgtcccccgcgccattaaatcgcccgttctgtatttctcgtaaaacggcggtgacatttgaagaagccttcccatcagctttgaacggagaatcttctccatgacattcgccccgccgaaaagctgatacatccaaaaataagacagtaaatagacggctgccgttaatgcgagaaaaacacatatgtaaaacagcatcccgctttttgtaaacacacccgccttcatatcgtctatcgcgttaccgagaagtttaggcggaaacatttcaatgacattcacaatcaataacagaacaatcgctgtcgtatagcgcagccaataggctttaaaaaaccacgcgagcttttttaatacagtaaacaaatactgtcatcccctttcatcaatcagccgccctcaagctttcccggattgtttttcattgttttcgctaataccgccacatgcatcacacctgtctttctttcatttttttgtataaaaaaagacatgaagcctcagctccatgcctcttattattataaataaggtacagacccgccgtttatgcgcgactgccccgtttttaagcaaatgttcagaaaacggaagctgtatgggagtcacgccggtattcagctgaagatgagttgacaagctttagttttgacatgatccatacctcctttttccctatattgttccttcatcatataaacaaatcctttttttgtcaatgcaggttttgcatttctgccattcgggtattgtaaaacaaaccttttttactgaaaggatgaggccgatgtttcacgcggaccggttgatagcagcttttgacggaagtgatgatagtaaaaaagcgctccaaaaagccatagacctttcaaaaacatttcacgcggatttaacggtcgtacattcccacaatgcaaaagatacccagacgattgttgatcccccgaggccgggagccggggcaacgtatatcggcggcgggattgcaagcgttcctgacccgctccaagcggaaagaatctcccctgatccgatgatttatgaagaccgtacggaagaaatcgttgcggaagcgagaatgctgatgaacgaaagccagattgacggggatatcgacattttagaaggtgatcccgctgatgccattatcgagcatgccgaccgtatatcggcggatttgatcgtcatggggagccgggaccagaacaggctgaaaaaacttttattcggaagcgtcagtgaaaaactgtcatcgaaatccgatattcccgtgctgatcgtaaaataattctttctgtaaagcagcttaatcaaaagctgctttttttacagctcccggctgtttcttctttttttcggcatcacaaaaaaactcgccatgatcaaaaaatcgatgcataatacgacagaccagccctttaacagcttgctgagcgcttcggtgcgggaagcgtcctgaatgagaaataccgttccggctaaaagaacgccgccgatgacaaacgctaatacatgtctcccccacccttttgcataatgtttggcataatccagcccgtaccgtttgaccggtcttgccccttccttgaccacataatagcggaaccgctcatccgcccattgaatcatgcttttcccgaaggcgacagacactccgatataaatggccgccaccgcatgcgccatagtcgccgccgcccctctgtataaatcagctgcggccgccagaaacagtacggcatccaataaaggaatgagagcgaaaaaaaacattccgagcttttgccgcctgaatatatagcgcgccgccaatccgaagatgacagccgcccaaaaagcagcctcacaaatgacaatcaaccaagcaatcgcgttcaatccggttcccccttatcgttttctaaaatgcattgtatcactgctttttatttaatacaactgtgttacaaaattgcaagaaaaaatatttcctgttacactggaaccatgcctaaaataatcgatcatgaaaaaagaagaaaacaaatagccgaagccacttggcggacgattttggagcggggaatggaaggagcgacagtgagaaacatcgcccaggaagcgggtctttctttaggcgcgctgaggcactatttcaccacccaggatgagcttttagggtatgcgatgacactcgtaaaagaaaaagcggccgccagaattaacgaagttgccatgaaagatctgccgccgaaagaaaaagcggtgcgtctgatgcttgaaatcatcccgacagacgaagaaacgatggctgaaatggaggtatggttcgctttcacagcttatgccagacataagggagaagagtttcaaccccagcaggacgggatcttggcatatatccgcggtctgattgactggctggatgaaaataagcttctgaaaccgaatcttgataaagagatcgaagcggagaaaatgtacgccatcgccgacggattggcgctgcatgccatgcttgaacctgagcgtctttcaaaagagaagatctcccgtgtgctcgttcagcatatcgaatctctttttatctgactgaagtaaaaaggccggatgtgttccggccttttttcagcttatgactgaaccccgagctcctgctgaatgtgcgactgaaaagcgtcctgaatcgttttggctacaggtcccggcgctccgcttccgaccggttttccgtcaagggttacgatcgggattaattcagccgtcgttgacgagatgaaaatttcatccgcatccctgagttcgtcttcggtaagagccttctcccgcacctcaatcccgttttctttcatcagctctaacagtttcatccgcgtaatgccgtttaaaatcagctcatttgcaggatgcgtccggacagtgccgtttatgacggcgtatacattggaagaggttccttccgtgaccgctccgtcccttatcagcaccgcttcataagcgcctgcttcataggctttttgtttaatcatcacattatacagtaaattcagactcttaatgtcacacctcagccagcgtttgtcctccgccgttatggcctgcgctccggctttttgttcattttccggttttttcactgaaaaggtgtatgccgtcgtctgcggttccaatccttcgtcatactggtgcttccgcggcgccttccctctcgtcgtctgtatatagaccccgccgtcaatgagtttgttttcctgtacgagcttttgcagatcccattctatgtcctctgcggagaacggcagggtgatgccgatttctgcggcgcttctgaaaagacggacaatatgctcacgcagaccgaataaggcaccgttatacactctgatgacctcatacacaccgtcaccgaattgatatccgcgatcctcaatatcaactgccgcttcttcacgatcaatcaactggccgtttactaatgtcttcatgtaaaccctcctcatcgttatctgccgtgatgtgcattctcagctgttattgtcaactattctatcatactgaacgagcaggctgcggagtttatttttttcttaaaatcttattattcgacatcttttctatgtcttttccagttttgttcctgtatacttgattcgacatacatatgctgttaacttatggcacttcgcaagcctccgctgttatcggcattatgcagaaacttatgctactggagagattgttatgcgcaacacaaaagaaggtgcttccccttctctgttttcattggcttttaaacttacgagtttagcagttttgtgcggactgcttctggtaatcgtcataatgggatattccgcttccgccgcaaaaaacaaacaggtcaccgtgaccgcaaacgggcagcttcgggatgaagcagaaagcctgcggctgaaaaatgattctcccgacgtcttaatgaaacatttgcagagagagcgtgacccagggaaaaaaacggtatatttaaccttcgacgacgggccgtctccatatactgaacagctgttgaatgtattgaaggcaaatggcgcaaaggccactttttttatgcttgaaccgcggatgaaggcctataagcattccgtgcaaagagcgaagcaggaaggaatcgcgctcggcctgcacggcgtgacgcacgataatcacctgttttatcaaacaccgacatcaccgctgaacgaaatgcagcagggacgcgatacactcgaggcaatcaccggagtaaaaacggatcttgtccgcacgccttacggcagtaaaccgtcattgacggatgcccagattaagaatctcgaaaaaggcggattcgtgtactgggactggacgatagacagtgaagactggaagtacaaaaacgcacggtacgtgccggaagtattgaatcagctcgcatatttggaaagcgttcatacgagcaggccgcatgtcattttaatgcacgatctgcctgcgacggtgcacgctttgccgagcctgatccaaaaactgaaagcccagggctactcctttgatgttctgacggatcaaatgattcccgtccatgaataagaaaagccggatctgtatatgatccggctttttttatgtcgcggcgctgatccgttttgcaaattcaccgatcttctcatggatgacaagatcaaataaatggtcgcaatatgtcggctcaaggttaatgatcacctgcttcaaaccgggaatccgtcccgcatcctcagggacaaaccttgccggcgccacttcaagcgaagtgccgatcacaagaagaagatcagctttatcaagcttttcataaagggtttcaaaatgctgaacgagatcgccgaacagcacgacatccgtttttaatacggtgccgcataccgcatgatcaccgatttccgccgtacattccggcacttcgtccttcagcagatgagaaagcccgtagcgcgctccgcagcgggggcatgcggcggtctgaattgaaccgtgaagctcatagacactgctgcttcccgctttcttatgcagcccgtcaatattctgcgtgaaaatgtctacctgctttccccgcctttcaagatccgccaaatacgtatggccggcattcggctcatagcttccgctcattttcatctgaaagagctgtttgaatttaggccagaattcacgcggacggcgttcaaaggattccctgctcatcgcttccattctggaggtgtcttcggtccatataccgcccgccgaacgaaaatcgggaatgccggattccgtgctcattcccgctcccgtcagcaccacgatacgttccgcctgattgatcaatgttataaacgcttccactcttccaccgccttttctttttatcatatcatgaaaaaagaacggcgcctgttatgcccgttctttttctccggaatgatccttcacatgaaccggatcatcgtggcttttctgttttacgaatacattctggcccggataggcgaattccacgccttcctcagcaaaaatatcaataatccggcggttgatatcctgccgcacgtccaagctttccgcccagacgatggtctttgtgtaaaagttgaaaaacagattgtaatagctgtccgcaaacacgtcaaagttaaccataatcgtatcatcatgcacgccttcatgttcacgaagcatttctctgagccttgtgatgcaccgctctaaacgatcaatcggcgtcgcataagaaacacgaacggaaaacgtgacctggcgcttcgtcatcctcgtccagtttgtgatggcttccatggacagcgttgaattgggcacggtaacaagcgccccctgcgccgtgcggaaccttgtgcttcggaatgtgatatcttcaacgccccccgttacagatgacgtctcgacccagtcgccgatcgtaaacggcttttccgtaatgatgataatgccgccgaaaaaattacttatcgtatctttagccgcaagcgcgaaggccaatccgccaagtccgagtccggccacgaacccgtttacatcataattgaattcctgcgcgatcacactgacgctgagcgcgagaatgacaaagcgcagcaccttggataaaaacggcgccaaaatgtcatccatatcaagctcaaagcgctgattgactttatgaaataaaaacgaagacgccgatgtcagattgcaaagcccccaggcgatcagcgcaacgatcagagagcggtacaattttttgacaatgtccatctgcccgtctaaaaacggcgaatactcaatcgccaaaaacagacccagcgccacgaaaaaccacctggccggcttgtcaaacgctacggcaatctgtttgaatatgtcggttttcggcttgtttgccaatttgtaaatgagctgaaaaaagtatttgacaaacagttttctcaaaacgagaaaagccgctaaaattccgatgctgatactgatctgcaaaatatggtcaagcgtaaaaaagctctgaaattgtgtcatcatggcatatgctcctttgtcttgtcgaaaatctattatactaaaacattcggacatcagcttcttttaatgtctttaggcacctgaaaaaccccggcctcagagcacagccggggttttcacacattcgttcatctttcagccagatacaacagggtcaggcactatttcttctttgattgtgtctgtttcaggagagtcgctttttggatttcagcatcggtttcggccttaattctttcttccactttcaatctcccttttcccatgatctcgcctcctttttgccattataaatcatcactgcggattgtaaaccgaaaaaagcactatctttattccaaaaaaatactgtttcgcacattcaccagtttgaatcgctgtgcatatacgaatctgatataataacagaaatgcccatgaggggagctgacaagcttgtataccatcgctcatcgcggcgcatccggttacgcgcccgaaaatacatttgcggcatttgatatcgctgccgaaatgaacgctgatttcattgagcttgacgtccagctcacaaaagacggccagattgtcgtcatccatgatgacaaagtcgaccggacgacggacggctccggttttgtaaaagattttacgctgaagaagctgcagtctctggacgccggcagctggtatggggctgagtttaaaggggagcggattcccctgctcgaagaggtcttgaagcgttatcattctgaaatcggttttttaattgaactgaaagggcacgtttctcaagtcggtcttgaaaaagcagtcggccagctgttaagcaggttttccttttccatccgccctatcgttcaatcattcagcctcaagtcaattcagacctttcacgacatgtatccgtccgttccgactgcaataattgcaagacccagcttcgggatgttttccaaaagccagctggccgcctacaaatcagccgtaaattatgtcaatattaaatatacccgcctgaatcggttcttgatttccaccgctcacagacacggcctgaaagtatttgcctggacggtcagaaatcaaaagacggccgaaaaactgcaaatgatggcagttgacggcattgtaactgattttccggattttatttctaaggatggctgatatgaaacaatatatcgcaatttttatcggaggcgcgcttggcgcattgctccgctttgaaatgagcgcgcacattcacagcggttctttcccggcggccactttcctcgaaaacgcggcgggaagccttttactcagtcttattacgggttatttcatcattcgggctaaacgccctcttttgaccgcctttttaggaaccggtttttgcggaggtttcacgacgatgtcaaccttcgcaaaagaaaccatttttctgctgcaatcgtctcccgcagcggctttttgttatgctgccgcgatattaatctctggcattgcccttgcatacgccggcattttctggggacggcgtattgcccttcacgcagcgggaaaggggcatgatacgccatgacgattgtcctgatgcttatcgcagcgggtatcggagcggtattacgttctcttttgggtaaaacaatttcagaaagaacaaaaggttttccgatgccgcttggaatggctgcggtcaacctgctcggctccttcggcctcggcatgttcaccggcctgggcctggataatccttctgccggcatcatcatcgcgacgggctttttcggtgcgtttacgaccttttccacgttcagtattgaagccgtgcagctgatgatgaacaaccgcataaaggaaagcctgctctacatcgctgtttcagcagccggaagccttttggcgttctggtgcggctttgttatgatatccatttaaaaaaaccttgagcttatttttcgctcaaggttgcgttatgaagcatgaccgtttcaggcacgggaagctggcggtttattgttccctgaccgcccgggcggacctgttcttctttgagttcaagctgtttaataaaccggccgtccatttctaatatgagggcagtgtatcccccgatttgtatcgactcacccgcacagatgtcaatattccgtttcagcacaagtccgccgatcgtgtcgacttcctcttcaatccctgcgccgagaagatgattcacctgatcaatccgaacctttccgtccagcacataatggcgttcggacagcttttgaatctgcggctgttcgtcctcatcaaattcgtccctgatatcgccgacgatttcttcaaggatgtcttcggtcgtcacaagaccggacgttccgccgtattcatcagacaatatcgccaaatgaatccgttctctctgcatttttatcagcaggtcgtgtatcgggatcgtctcgatgacttcaatcaccgggcggacgtaagacgtgatggatacttccgctttttcatcttctgtcataaacagcagatctgaaaagagatgcttcgtattgatcatgccgatgacattgtctttgtccccgtccgttacgggccagcgcgtatatttgtctttcagcatcatatcaagcatttccggcacgtccatatcagtggaaacagccgcgatttcttttctcgggatcatgatttccttggcgatccgattatcaaaatcaaaaattttattcacaaatgtatactcagaaggattgatttctccgttttttaaactttctgacagcaggatccgcagctcttcttcagagtgggagccttcatgctcagatgccggctttaatccggccaaaccggtcagaattctcgcggagccgttcagcacccaaataaacgggaacatgaacacgtaaaataaccgaagcggtccggcaatccataacgtcagcttttcagctttttgaatcgcaaccgttttaggcgcaagctcaccgacgacgacatgcagaaacgtaatcagcccgtacgccgcagcaaaagaaatcacatgctcagcagaatccggcagccccataccctgaaacacaggatgaagcatccgctcaaatgcaggctctcccagtacgccgagcccgatggatgtgagtgtaatgccaagctgcgacgcggataaatactcatcaagatccgtaatgatacgctttgcgagcaccgcccgtctgttcccttctgaaatgagctgatcgattctggatcttctcactctgacgatcgcaaattcactcgccacgaaaaatgccgttaacgcaatgagcacaccgattaaaatcaaactgtcaatatcgtccatttcaccttatcccgaattaaaggataaggacgtcacctcctgatttcatcgttttttcttaagcgagaggaacgaaatgggtgattgactacacagagggccccatcctgccacctcctaagtcaaagcatgattgtcatttgtatagtttattgtatcacaactccattctttcatcattttcagatttttatcatataaaaaacagccttcaaaaagaaggctgccgttatgtgctccggaaatgattttctaaacaaagcgccgtattaatccccccgaatcccatgcttaagcttaacgcatggtgtacggtatgggcgctcggcccgtcggtcacccactgaaacgaatcgtcaatcggctccgttaagtttcggatcggatgaagcttgttttcccgcatttgcaagagagcagcaatgatttccaccgttccggccgcactcagaccgtgtccggtaattgattttgtcgcattaatccgcgcgtgcgacaggccgctttcagaaagcgcccggcattcagtcttatcaccgatcggcgaaccggtgccgtgcgggttgatgtaatcgatttcttttgctgaaagaccggcccgctccagcgcctggcggatcaccgtcatttcgccctctgctgaaggattcgggttgcggttcgcatcagaagccatcccccagccctttaagccggcccacgatcgtgcgcccctctgttcggcagattcagcgcgttccagcacaatcgccccgcacgcctctccgaatataaacccgtccgtatgccggtcaaacgggcggcaggcggcttcaggccgttcagcgtatgtatcagtgcccatcgctcccaaagaacggagagcatgacactccatgtacgacagatcggccagcgccccgatcacgatgcaccggtcaaacaggccgcctttgattccttgagcagcctgaataaccgccgcctggccgctggccgacgcgccgccgaccgtaaaggccggcccttttatcccgaattgctccgtacaaagccccgacaaatcactatccataaaagaaagcccgtatgtcggatttacaaattgcggcgtttcaccgtttttctcaaaggcctgcagcaattcgcgctgcgtcatattcgagccgccgatgatcagaccggtgcggctgtgatcagcgccgtctaattgagcgtcatgccacgcttcatataaagcgataagcgccgtctttcctgataatgcggctcttcggtacaagcgcttggacagcgcgtccggcggcgttaattcgctaagctccgcgccgataaacgaactgcctttctgccggccgggccgtttcatcacatcaaaggcgtgccgcccctccatgagcgcatcgagaaacgcctccttgccttgcccgaccgcggttaagactccgattcctgtaatgctgatctctgacgtgccattatttctcctcgacatttgtccgttctcccatctttatgtattggaagctatgaagaaaaatcttgatacagtgctttgaaaatatcgcgcgactgtctgatctgttctgaaggcacgctgaaagataatcggaaatagccgctttttccaaatccgctgccgggtacgatcaatagtttgtatttctgtgcggcatgcatgcagaatgccacctcgtcttcaatcggtgatttcggaaagacgaaaaagcctcctttcggcatttcaaattcgaaaccggcttctgtgaggatgtccaccataaggtctctccgctttctgtaaggttcagcgtcaatcgaaagatcatccattttcgccacggcgcgctgcatcatgaccggagcgttcacaaaaccgagcgtccggttgcagaaaacgaacgcatccgtcagaagatcgcccccaggcatttgggcgtctgccgcgatatacccgagcctttcccccgcaatgccgagatctttactgaacgaactgactaaaatcacgcggtgatacgcctgaaacggattcgcctgctcttctccgtagatcagctggctgtacggttcatcaaataaaataaatatgctttggccgttccgctcttcggcttcttttaataaggcgcccaattcgttaaggtttttctggctgagcacagtccccgtcggattatgcggcgtattaacgatcaggcctttcgtacggggggtgatcgcacctttaaccgcttcaatatcaatctcaaatgagtcagtcagcgggcagatgacgggtctgccgcggtaattttcaacatacgctttatattccgcaaaataaggcgaaagaaggatgacttcttcctcggggtttaaaatgcttttcagcgcgacattcagcgccccgccggctccgaccgtcatgactgtatgcctggcggaaatttctgtctgaaaccgctctgacaaaaagcgcgcaaccttttctctcgcctccggaagcccctggttttgtatgtatccgtgccgccctgtttcagccgcttcgcaaagcgcctttttaaatgtttcaggcggctccgcaaccggatttcctattgaaaagtcaaacaccttatcggcgccgaactcttttttcagccgagcgccttcatcaaatagtttgcgtatccatgaccctttctccagattctgtgtcacttcccgtgataaaccggccactgtcatctgtcccttctgtctttttcttccgtttctatttacaatgattatgaaagatttacatggcgcagtcaacgctttttcagacagcccgccgcgccgtttcaggagaaagacggaaaacaataaacttgtgcaaactccccttcatatattaaactattctcataactataacgtgatggttggggagggatttagatggggctgagacttatcgcatcagtgaattagcagagcttgccggtgtaacgaaacgcacggtggattactacacaaacctcgggcttttaaagcctgacaggtcttgttcgaactatcgttactacgatacacttgcacttaatcggttaaagtttatagtcgcttgtaaaaagcagcgattggccctgtctgatataaaagatcgactggagaaccagtttccctcttcagccctgcctgacgatattggaaatctggcatcggaaattgatcacatgaatcaaaacatctccgtgatcttgaatcggtttgaaaagcttgaaccagaggagcgcgcccagctgaaaaaaaggctggctcctgaaaagcttgcagtgcttcaatcatttatgctgctgttaagttaaaccattatcttactaacaggaggtgttaccttcatcttcccaaaagaagtgaaggttctaattggacattgtgaatttgattttagtcgcggttttaatcgcgctgacggcatttttcgtagcatctgagtttgcgataatcagaatcagaggctcacgggttgaccagcttatagcagaaggaaataaagccgcaatcggtgtcaaaaaagtgaccacgcatttagatgagtatttatcggcgtgccagctcggcataacattgacttccatcggtcttggtgtcttaggcgaatcaacgattgaacgcttgcttcatccgcttttcacaaagataaacgtaccaagctcattatcgcatattatttcatttattctcgcctatgcgatcattacattcttacacgtggtcgtgggagagttggcgccgaaaacagtcgccatccagaaagcggaagccgtttcaatgctgttttcgaaaccgctcatttggttttaccgcatcatgttcccgtttatctggcttctgaacaactccgcccgtcttttaacgaagacgttcggtctggagacggtatctgaaaatgagcttgcccactctgaagaagagctgcgcatcattttatcggaaagctataaaagcggtgaaatcaaccagtctgaatttaaatacgtgaacaaaatctttgaatttgacgacagacttgcaaaagaaatcatgattccgcgtacggaaatcgtcagtctgccgcatgatatcaaaatttctgaaatgatggacatcattcagattgaaaaatatacccggtaccctgtcgaagagggtgacaaagataatattatcggcgttattaacattaaagaagtgctgaccgcctgcatcagcggcgaagtatcagtcgactcgccgattaccgattttgtcaatccgatcatccatgtgattgagtcggcaccgattcacgatctgcttgtaaaaatgcagaaggaacgcgttcatatggcgattctgtcggatgaatacggcggaaccgcggggcttgtcaccgttgaagacattattgaagaaatcgtcggggaaatccgtgatgaatttgatatcgatgaaatcaacgaaatccgtaaactcggcgacggccattacatgcttgacggcaaggtcctgattgatcaagtgaacgaactcctcggcatccatttggaaaatgacgaggtcgacaccatcggcggctggttccttacccagaaatacgacgtcgaacaatacgactcgattatcgaagaaggctgtgaatttatcattaatgaaattgacggccaccacgtcgcatatatcgaagtgaaaaaactggcgtttgatgaactgctggaaaccgccgaacaaaaagaagcataacaaaaaagcttgcgcgtctgatacagacggcaagctttttttcatttacagttgttcaagttttttctcaagctctttaattctggcattcagctcttctgtcatggccgcaagcctctccttcggcgcaagatcggaaaagtcctccaaaaaaatcggctcgccgatgataagccgcatttttccctttttaaacagcgcttttcccgtagacggccctttatatgcggccggaacgagcggcgcttttcccatttgggcgatggtcacggcccctcttttcagcgggacgtcttctgatgttctcgtaccgctcggaaaaatcccgacaatctttccttccttcagaagcttaatcggcgttttaatgctgcttgggcccggattttcacggtcaaccgggaatgcgtgaatcttcttcaaaaaacgtccgatccactttttctgaaacagctcttttttcgccatataatgaatctgaaggggcaatatcccgacaccgagcgtgaggacatccacccagcccgcatgcgtgcacgcgataacgaatcctttatcagacggaagattctctttattgtacactttcactcctccgcgcagggatagaatgcatttgatggcatttgcacaaaacttatacataacgcacttcctttgttgtaatgatcaaaagtgttctctctctctattataacaatattttttattacctggtactaataattatatttttcctccgccgatctctatcttttatgacggattttgggtactatagagaaatggtgtttgatgaggtgaaaatgaatttaagccgtttgcatggaacgtgcaactttaaacctttcttatgcgtgtataacatagaggggagaaaaggcagtgacgatcgatgaaatttaccaattgtatatgaatgatgtttaccggttcctgctctccatgacaaaagacaagcatctcgctgaagatttgctgcaggaaacctttatgagggcatacatacacattcactcctacgaccacagcaaagtaaagccatggctttttcaagtggcgagaaatgcgtttatagattatgtcagaaaacataaaaaggaagtgaccatttccgatgacttaattgggagcctttttcagacggctgttcaaagcccggctcatcagattgaaatcaaggaagtgctgacagggtatatgtccgaacttcccgacaattatcgggaggccttaacactgtattatttaaaagaactgaattacaaagaagcatcccatattatgaatatttcagaggctaattttaaaagtgttttatttcgtgccagacagcggctgaaagcactttataatagaggtgttaatgatgaatgaagaatttaaaaagcgtttttaccaatacaaaaatggagaaatgagcgaccgggaaatggccgcctttgaagaagagctggaaaagctggaagtctatcaggagttgattgaaagcgaaatgcaggacgaccgggaatgggacgtcggcatcagcccggaaaaacagaaggccattttatcatacggaaaacgcaaatcgtatttgcggatttcagttctcgccgtcatctccactttgatgattttgccgctttgcacattaggaagctacctctattacggtctgggaggaaaagaaagcaccggcaatcaattaatggagaccgcggcagtgacggtggcgaccacaatgccgaacgtcctcgtcgatacctccggactgaaaagccaggtgaagctgtttggaatgaatacggaatttccgctgcaaaagcagatcggcacaaaaacgaaatccgtcggcggagaacggattgaaatgtttttagatacggtcaaatcgcctgccgttaactactatgatctagacgcggcacaggcaaagcattatttcgcccatccttccggcttaaaggaacgtacgattgaaaaagccggacagacattaaaaaaattgcctgaaggaagcgtggcggaggtctatctttcttatgacagggcctacccttcttctcaagtatattcgacttttaaaaaatacgatgtgaagtttttatggaacgcggtcgaaacggagaaaaatctgaaagacagtccttatgcagagccgttaggatttcccgggaaagattccaagatggtgtcctctttcgaaacgcaaggacagacagaccgtgaacaatttatcaatgcccttgaatttatgtcccgccataaaaaatgggcgcatgcaatatcgaaacgcaaagacatgaatcttggcagccgaatcgactatgttgaacatcacggaatgaacgtatacggctctgtcgtgacggggccgacaaaagaaatcgaacgtctgctgaaaaacaaaacagtaaaagcagcaaacatcggtgaggtggaattatggaattggtaagaatttttaaagagcataatgttttcggctggatatcagtcggtaccgcgattttgtcgctgctgcttttgaacgtggcaatcatcagcaatgtgactttctattcttatcagatgctgccgtttgcgatggccgccgtgccgttcggcatcattgagctgtttattaaaaaaggacggacgggcccgggactgctcggtgtcattctcaatctgttcgtcattgtctgtgtatatacgatcgttgcggttgatacgaatctgcaattcggtttttaaacataaaaacaggcccttttacgggggcctgtttttttaaaatgaaagaacgccgattaaatgcagcaatacgacgatgatagccagcggcacgagatatttcagaaggaaataccacacctgaaagaaacgatagccgatggcggaaccgcttttcatctcggcaaacagctcctgcttcggtattttcagcgggacgaagattgatattaataaagcgccgagcggaatcagcacattgctgacggtgaaatccgcaagatcaaaaaacgtttttccgaacaaatgaacatcaccgagaacaccgtatgataaacaggacggaattccgactaagaaaatgagcagaccgcttgtccacgacagcttctttcttttcgtttcatcacctttcccgacagtcgccacgataatttccaccatcgaaaaggccgaagtcagcgcggcgaagaaaaagaccgccaaaaagctgataaaaaacagcgagccgaacggcagccggtcaaacacagccggcagcacggtaaacagtagtgtaggcccttcatccggtttaaagccgaacgaaaaaaccgccgggaaaatggccagtcccgcaaacagcgtaacgagcacattcatcataacaatggaacccgccgaacccggaagattttgggttttcggcaggtacgaactgtatgtcaccatgaccgaaacaccgagcgttaatgtaaaaaacgcctgtcctaaagcatataggatggattccggcgtcaaatcttcaaagtgcggaaccaataaaaatctaatcccctcaacggcatgatcgagcgtgactgatcgcagcacaagcaatagaaacagcacgaataaaatcggcatcagcaccgcactgacacgttcaatccctttctgcacgccttttgcgacgaccgccaccgtcatgatcataaatacaagctgcgcaatgagagtctggatcggattttcaatgaccgtcccgaacaccgtgccgtactgctcctgagtgagcccggataaagaaccggtaacggcttttaacacataaagcaaaatccacccgccgacaacactgtaaaaagacaaaactaaaaaacaggccgccacacccacataacccgtaaggtgccataccgacttcggcgcggcttgtttgtaggcatcaatcgcatttgtctggctccgtcttccgaaaataaattcaccgagcaaaagcggatagcctaaaagcacggtaaaaaggacgaatacaagaaaaaaggcgcctcccccgttcgtacccgctacgtaagggaacttccaaatggctcccagaccgatcgccgaaccggcagcggccataataaatcctatttttgaggcccattgaacccttttttggtcagacacgactttccacttcccttccgccctatattatcccttattcgctgcgataacttaagcccatttcaatatgtttcattattccgaaaaataaaaaggagcggcgggtgccgctccttacaaatccccgtttaatttcgaatgctttctcgaatataagaaataaatcaccagaccgatgatcagccagataaagaaacggaatatggtggtggcgccgaggttaataatcaaaaacacgcagaacagaatggacaataccggaataaagggaacccccggacatttaaaagcccttggcagatcaggctgtttctttctcaatacgataaccgccacggaaatcaggacaaatgcggcaagcgtgccgatgttcaccagcttcgccagttcatcaagcgggacgagcgagccgagtaatgccgacaggatgccgaaaacccatgtcaccacgtgcggcgttttatgcttcggatggacttttgaaagcgcccccggcaccaaaccgtcacgggacatggcaaacatcaccctcgtctggccgtacagcatgacgagcatcaccgttgtcatccccaacactgcgccgatatcaataatcccggccacccaattctgtccggccatctgcaggacgagagacacgggatggtcaacgccttcaaagcgggcaaacggaacgacgcccgtcataatcgccgatacggtcacatacagcacggtgcagacgattaatgaaaagataattcctttcggcagatccttcgccggatttttcgtttcttcagcggcggaagagacggcgtcaaaaccgataaaagagaagaaaacgagcgccgcggcactgaaaacaccgccgaaccccatcggtataaacggctgccagttgtgaggtttgacatatacggccgcaacggcgataaacaatagaacaaccagaacctttaaaatgaccataatattattgacccgcttcgattccttaatgcctaaatagaggaggaatgtaatcgcaagcacgataacaaatgcggggagattaaagaatgtgaccgtgcctttaatggatcccggcgcggccgttaatgcggtcggaagatgaatgccgaagcccgccaagaatgattgaaaatagccggaccagccgaccgaaaccgcgctgacggcgagcatatattccaagattaaatcccatccgatgataaacgcgagaagttcacccagtgtcgcataagtaaacgtgtagacggaacctgaaaccgggacgcttgaagcaaattcggcatatgacagagccgcaaataaacacgcaagagcggcgatgacaaatgaaacggtcagccccggccccgccgtgacagcgcctgttccggttaatacaaaaatccccgttccgatgatggcccctatccccagaagggtcagatcaaaggcccctaactctcttttcagcgacttttccccgcccgttgcggcaagcaggtcctgaatgcttttctttctgaatacgctccccttcatctgcttcactccttgtaaatcaatatatgttagaatattcagataacaatagcaataatgactaaattcttatttttcgcatgaaatgtttcagcacatcatccctttctcctatgtcatattatagcgaaaaatataaaaatgaaaataacttttttgaaaattctatatattatttttagttttcataaaacagaactcagcggattctccactgtgaaatattaacattagtgattcagctggcgacgtccattttttgaaaatcgtattcatatgtacgttcaaataaaaatcccgcactctttaaaagcgcgggataagacttgcgtattatgttgaaataaatcttccgccatttacgtgaatggtttgccccgtcatataggaagattcgtctgaagccagaagcacgtaagctccggcgtgttcagcaggctgtcccggtcttcccatcggagtgtccagaccgtgcttttccaccttttcttcagtaaacgttgccggaatcagggcggtccagatcggcccgggggccaccgcattaactctgatcccctgatcggccaatgacatcgccattgaacgcgtaaaggaaacgatgccgcctttcgtgcacgaatagtcgatcaatgatgtgtctccctgataagcggtaatagacgttgtattaatgatggcgctccctttttgcaggtgaggcagcacggcttttgtcatatgaaacatagaaaacatgtttgtacggaatgtcttctccagctgttcagctgtaatatcaagaatcccgttttgcggatgctgctcagccgcattattaacgagaatatctatttttccgtagcgatctaagacttgccggaccgccttctgacaatgcgcctcatcaccgacgtctcccggaattaacaggcattcggcctggtattcttccgcacgctttttcgttctctcagcatcggcatgttcgtctaggtacaggatggcaagatccgctccttccttcgcgtaagcgatcgcagccgctgcgccgatgccgctgtctccgcccgtgatgacggcgacttttccttttaatctgcccgacccttttacatccgggtcctccaagagcggttttggctccatgtctgactcaatgccgggctggcggttttgcacctgcggcttttgtccttccgtctgtctgtctatcggattcatattctcacactcctgcaattggtattactgagacgataccacgcagtgcggggagttaaacggacaaatatgccggtaattaaagctgctgagccgtttcgggaaaagcgccggtgtatttcgcagacggcctgtaaatcatgttgtcagcggactgttcaagcacgtgtgcgcaccagcctgccattctgcttgctgaaaaggtcggcgtaaacaaatcattgtcgacatcaatggcctgcatcacagccgctgcgtaaaactccacattcgtatacagcttccgtccgggcttatattgctctagcaggcggatggcttccttctccacataaagcgccaagtcaagcgacggatcatttcccgccacctcttcagcctttatgcgcagcgcttccgcccgcgggtcttttgttttgtacaccctgtgcccgaagcccatcaggcgttctcccctcataagcttcgctgccaaatacgcttctgcattttcttttgtcccgatgtcttcaagcattttcgtgacgcctgaaggcgcgcctccgtgcagcggccctttcatcgtacccagtgcggcagtgacggcagacactaagtccgattcagtcgaaacggtgactctcgccgaaaaagtcgatgcattcatcccgtgctccatcgccagaatcatatacgtctcaagcgctttcttttgggctgcggacggctgcctgcctgtcagcatatacaaatagttttcaacgtgtccgtatcgcgcctcaggtgacaacgcttcctgcccttgtttacggcggtatctgtacgcaataatcgtcggtgtgacggcaatcagtttaatcgcttcttccggcttgggcggatatgtaaatgaatctgtgcccaaacctgaaacagccgttctcagcaccgccatgtcatccatttcatccggaagcgtttccagtaagtcgatcaaatgtttcggaagcccgcgctcggctgcaagttcttcctgaaacgcaagcaattgccgctcatcaggaagcgccccgttcaaaatgagatacgccgcttcttcaaaactggattgcagcgcgatatccttcgcgtcatagccgcgatatattaaatgccccttttctccgtcaatgtggctgatcgccgtttctgcacaagtaatccctttcaatccacgataaatcaatttcattcccccttatcctctttctgttattatagtaaatataatatttaaaaaataatgaatatttttaagggaattaattaaaacttttaatcagaggagtgcatctatggattttaaatggcttcacaccttcgtcaccgcggcaaaatatgagaatttcagaaaaacggcggaaacgctttttttatctcagccgaccgtcaccgttcatataaaattattagagaaagaaatcagctgcaagctgtttcagcggagcggccggaaaatacaattgacggaagaaggaaaagcatacgtgccgtttgccatgaggcttttggaagactatgaaaacagcatggcggagctgcacagggtgcgccagggctactcgcacacgctgacactcgctgtttcgccgcttatcgccgacaccgttctcccgtctgtcatgaagcgttatacagaggacaataaagaaaccgaaatgacggtcaccattttcgaatcggaagaaatcgcctctcaaatcagaaacggctcagccgatatcggactgagctgcttaaaggtgcaatcatcttccctcacttgccgccccctgtacaatgaccccgttgtcctcgtcgcgccgcccggccgaaaacccggaacagggaaggcggatgaagtgaaagacctgttcggacaatatctgcttttgacccataaccatcctgactattgggatgatttgctccgccaggtcagaatacagttccctttcgtcaggacaatgaaggtgacacagacgcatattacgaaacgatttattaaagaggggctgggtgtctcatttctgccgctgtcagcggtacgggccgaactcgccgcaggcagcatgattgaaattccgtgcgaattcgcccagatgccgagcgcgggcgcatacgccatcgccctctatgaaaatgaaaaaaagaaaacctttttagattttttatcacattttcatttttaggtgaaacaaatggagctctgtcccgtctaaataaaaaacccgttctgatgaacgggtttctatctctgctagaatcttttcgcgcccaggtagcgcggtttccagtagctgttattcagatcacttgttgtgacgccgtcagaaccggcatggatgaacttgttgtttccgatgtacacacccatgtgtgaagggccggcctgatatgttgtaaagaagacgaagtctcctcttgacgggctggacacgctcttcattgagctccagtatcccgcagtgctcgttctgccgacactcgtctgtttgtttaacaggtaccagataaatccgctgcagtcaaagccggaagtcgttgttccgccccatacatacggcgtcccggttaaagattgcgcatcagaaatcagcttgtttacattcaggctcgtctgtgcaacattatggctggatgaaggctgctttgatgacgaagatcccgaagacgttgaaccggaagttgatccctttactttaagaacttgtccgatgcggatcaggtccgtttttaaaccgtttaaactttttaattggtttaccgtcattttatatttattcgcaattttccaaaggctgtcgccttttacgactttatatgtagacgatgatgacttgctgcttgagcttgaacctgaggatgatttaccgttaatcgaaagcgtctgaccgatgtaaatgatatccgattttaatttgttctcagatttaatggaattaattgacgttccgtaccgatttgaaagtccccataatgtatcgcctttttttaccttaatcgtttgcgcagatgccgcgcccgcaaacaaagtcgtccccaaaaccactgccgttgttgctgtaacaagttgctttttcatattttcctccctgaatgattctatctattttatgtgtctcttttttaaagtttttatctgtttcctattataaggttcaatttccactagaaatagacttgacttcccgtgacaaatttcttactaattcgttttagaaaaaagtttttaagggtattaaatatttcaatttgatttcaaacgtgacgaaaaacgagtcaatttgtcatgtttttttcctgtgatcctcgtattttggaaaaacaaagcagtttattttccaaataaccccttgttaaaaaaatcctcgactttttcaaaaaagtgaatggttttcatcctttcttgaaaacataagttacaccggaatttacatttctaacaatgtttcacctgaaatttacaggaggaacaggcgctctttacaaacaccccctaccattagacatgcagacacgattaaaggaggacgagtgagaatgagtctatttaaacaggttcgatcaaaacttctgccggcggcagccgtatccgtgctgacagccggtctgattgcgggcgcggggcttcagcactccgaacaggctgcggcaaaaaaacagcctgacaaaaacgaaatcagaaacgtcatcttcatggtcggcgacggaatgggcgctccctatatgaacgcctaccgttcggtcattaacaaaggaaagccttcggatggtatgaaactgacggcattcgatcccaacctcaccggtatgatgatgacttatcctgacgatcctgattccaatattaccgattccgcggcggctggcacggcaatggccacaggcgtgaaaacgtataacgcggcgatcggagtcaataaaaaaggaaagcgggtaaaatccgtcctcgaagaagcgaaacaaagagggaaatccaccggacttgtcgcaacttcggagattgcccacgccacccctgcggcattcggagcccataacaaatcccgaaagaacatggatgacatcgcaagcagctactttgatgaccgcatcaacggaaaacagaaagtcgatgtgctcctcggaggcggcaagtcaaactttatccgtaaagaccgcaatgtaacaaaggatttcaaaaaagcgggatacagctacgtgacatcaaaacaggagctcaaaaaggatcgtaacaagaagattctcggcctgtttgccgatggcggactcgacaaagcaatcgaccgatcaaacgccgtcccttcattagaagacatgacaacggcagcgatcgacaggctgaacaagaataaaaaagggtttttcttaatggtcgaaggcagccaaattgactgggcgggacatgacaatgatatagtcggcgcaatgagtgaaatgaaggattttgaaaaagcgtataaagcagcgatcgcatttgccaaaaaggacaaacatacgcttgtcgttgccacggctgatcataccaccggcggattgacgatcggcgcgaatgacgataaaaactggcatgttgaaccgattcttgccgcaaaaaaaaccccggcatttatggctgaccaaatcaaagcgggcaaatccgtatcttccgtgcttgcgcgttatacagacctgaaatggtcaaaagctgaaatcaaacagatcgaaacggccgcaaaacaggatgctgacaagagcatctacaaagcgatcattaagctctttaatgcgaaaaccaacagcggctggacaaccggcgatcatacaggcgaagaagttcccgtttacgcatacggtccgggaagagagtcatttacggggcttttaaacaacacggaccaggccaaaaagatctttcacatcctgaaacacggaaaataaaaaaaggatgcgggggtttccccgcatcctttcttcttttacagatatctccggtgcactcctttgccgtcatacgaaaacatcacttctctgtcttcaagaacagattcgatgtgcacgctcctgccccacagctggtacagatacggcagcactttctccaaatatttcagatcaagctcaattccctcataccaatgtttaatataaagctcattattcttcaggtaatccccgtcattgacggtcagataaggaaatcccccgttgacccgcatgttcacgagctggtcgcgcacggccttccattctttgtcgatcactttatagtccctgccctgtttttggaataaatacaaatcctcacgcatcacgagatctttcgtcaaataattgcggataaatgatatatccgattcaatttccctgacctcaaacattttttcgcgtccggaaccgggctttactcctgtttttttcatttcatctgtcgggttatcataacgctcttcgatgtcttcaaaaattttcagccctaaataatacgggttgattcccgtttttgacggctggacaacgcctgcgttcagcttcgcaaattcgatggcttcatctgaagtcaggtcaagctcgcggataatccgctgatgccaataggatgcccagccttcgttcatgattttcgtttccagctgaggccagaaatacagcatttcttctctcatcatggttaaaatgtcacgctgccacggttcaagctcccgcgaatgttcctcgataaacagcagaatatctttttccggccggggcggaaacggttttttcccttttttctttttcacctgcttcggcttatccattccccataaatcatcgtaaggcgatggcgcggtttcttcttcgtcctcctcttcgtcatcgacgctccacagcagcttcggcctgacgagcgacggatcgatatgctcctgaaccgccagaatggcatctaaaaaggactccacctcttttatcccgtgaattctttcataatgcttaatccgctccgccgcagccgccatactctcaaccatgtcccggttcgtattttgaaagcggcagttatgtttgaaaaaatcacaatgggcaagaacatgggctacaattaatttattttggatcagcgaattgctgtccagcaaaaaagcgtagcaagggttggaattaatgacaagttcataaattttgctcaaaccgagatcataatggagtttcatcttgtgaaattgtttgccgaaactccaatggctgaatctcgtcggcatgccgtacgcgccgaatgtataaataatctcagccggacaaatttcatatctcatcgggtagaaatcaaggccgaaacccttcgcaatgtcggttatttcctcaattgcccgctgtaaaccttttgtctcctccgcgttcaaccgaatcccccctacttggacttatttataatgtatgacccctcctctcaaaagatgaaataacagatcggtttccgtctgaaaactttcggcacacccgccccgtttgctttatatgtaagtgggtaaaacacacaccataccccaaaaagaaaaggagcgattctacttgaatacagcagacatgctaacgacgtatctcagcaaactcccgaatctggtcattgcactgctcgtcctgcttatcggctggggcattgccaaaatcattgaaaaagctgtatacaaaggcctgcaaaaaacaaaaatcgacgacagactgttcgccgaaacaaagccggcgcgctattcctcagaaaaagtcatcagtaaagtcatttatttaatcgcattaatcatcgtttttattctattctttaacattctgcatctgacaaccgtggcttcgccttttgtcagcatgctgtcagcgataacggcggctgtgccgagcattttaaaagccggcctgattctgctattgggctgggcggccgcttcgcttttcagctatctcgtcaaaaaagcgggcatgaaactcgctgaaaacggccggctcagaaaatggacaatggtgtctgaagaagcggagatgagcaaatccgttacggccgcttcacgaatcgttttttacttcgtcttgctcttgttcctacccggcgtcttggccgctctccaaatcagcggagtatcagggccgtttacaaatatgatccaaagcgttttgtcctttataccgaaattattcgccacggcgctgattgttttaatcggctggcttgttgcccgtctcgtccgtgatatcgtcacaaactttctggcgagtatcggcacggaaaggctcgccgcacgtatggggctttctatatacctgaaggatacaagcctgtcggcaatcatcggaacgattgtctacgtgctgattttcattccggtgatcatttctgcgcttgaccggcttgatgtggcgggtatttctgaaccggcgtcagccatgctgcacacggtcttcacaatgctccctaatatcatcatcggtatcgtgctgatcatcgccggcatctggatcggaaaatgggtcaacagcattgtatccgggctcttgcaccgggccggtttcgactctcttctcggtaaaatgggctttgaacagacgggtaccccgaagctgacgctttctcagacggtcggcatgattgttcagatcatcatcgtcctgctgtttacggcagaggcgctgcagcttgttcatctcgaatttctcgtcgttatcgcaacaggtattatcgcttacctgcctaatgttctggccgctgtatttattctcggaatcggacttttggccggacagctcgtcagcaggctgcttgccggcatgctgagcggaaaggaattcagattcctggcgccggttgcgaaatataccattatcactctttcaatctttatggcgctggatcagctcggtgtcgccgacacgatcgtaaatgccgcgtttattctgattctgggcggtttcgcgcttgccttcggactttcattcggtcttggcggaaaagatttcgcctctcgttatctcgcaaaattggatcgcaaaattgaaaaacatcaatcggctgacgatcggaagccgccgatgtcttaacgaaaaaaacgtgtgctcagaaggagcgcacgtatttttttgagttaagggggcaaattccttttttttcattttagattcatatatgatagactgtaacagaagcaaaatctcttttttcgaggtcattctatgaaattaacgaactataccgattattctttacgcgttttgatttttttggcttccagacattccgatgaactttccaacataaaagaaatcgcagatacttattccatctctaaaaaccaccttatgaaagtcatttaccgcctcggccagctcggatatgtcgaaacgatccggggccggggaggcggaatccgtttaggaatgacaccggaagacataaacattggagaagtcgttcgaaatacagaagacgactttaacatcgtagaatgctttgactccaaaaaaaatctctgtatcatatctcccgcctgcaacttaaagaaccttctgaatgaagccctgcaagcttacctggccgttttagacaaatatacgttaagggatctggtcaaaaataaagaggagattatgagactgctcagaagctgaaggaatgcccgcattccttctttttttatgccggcataagaaaaaaggactatttctattaatatgataaacgattgcagacaagtgccgatataaagattatcattactgatatcctcaccttgcggctgcaacgaatggggatagtaaaatcatcgcaggaaaagggagattcattatgaaaaaaaaggtagcggtcggtttgactgcatctgcgatcgtcgggtctgcgttagctgtaacaccggcagaagcacaaacgattaaggttaaaagcggagattcattatggaagcttgcccaaaactacaatacgagcgtggatgccattacatcagccaatcatctaaaatccaccgttctttctatcgggcagacgctcaacattcctaacggcaaatcagattccggcagcaaaaagccatcttcaaagaacagcggcacgactaaaagcgtttatacagtgaaaagcggcgactcgctgtggctgatcgcatctgattttaaaatgtccgtacaggaactgaaaaaattgaacggtctgacaagcgacttaatccgcgcgggacagaagctgcaagtgacggggaaagtttcctcaagcaccgatcagaaaaaaaccgctcctggcagcagctcaaacagcagcaaaaagcagtcatcatcttccgggacgtataaagtcaaactcggcgattcactatggaagatcgcaaacagcgtcaatatgaccattgcggaactcaaagtattaaacaacttaaaaacggatacgatctacgtaaaccaagtcctgaaaacaaaaggaacgtcttcttcgggaaacacgccgtcaaaagacaattcaaaccaaaataaaaaccagacgcaaacgtcctcctatacagtaaaaagcggagactcactctggaaaatcgcaaacgcatacaatatgacggttcagcaaatcagaagcatcaacaaactgacgtcagacatgctgcgggtcggacaagtgcttaagctgaccaaaacgtcatcttccggctcttcgacttcaccgtcaactccgaaccagtccggaaatacagggaaaaccactacatataccgtgaaaagcggggattctttatgggtgatcgcccaaaagttcaatgtgaccgcccagcagatccgcgagaaaaacaatctgaaaacagacgttcttcaaatcggacaaaagctgacgattaccgggcagcagacaaacacgactccgaatcagtccggcaacacaggcggcacaggttcaacaagcgcgaagattaatgtaatgatcgatgccgcaaaagctcagctgggcgtaccgtatgtatggggcgggacgacgccgagaggctttgactgcagcggtttcatttattacgttctcaataaggtcacttctgtatccagactttcagccgcaggctactggaatacgatgacatcagtcagccagccggcggtcggtgactttgtctttttctcaacttataaagccggaccttcccacgtcggtatttatctcgggaacggccagtttattaatgccaacgattcgggtgtcgttatttccagcatgaacaattcctattggaaacagcgctacctcggcgcaaaacgtttcttctgatatctgacaagctgtacggcctcaataaggctgtgcagctttttttacagtctgaaaatattaatgctgatcacgtgttttgtcaccggatggaaatacacttcagcacgggatgaaaacgtttcttttgttgtttgcaccgttacgcgaaacacatctttcgtctgttcccggttcacttttgtacggcccatgtacgaataatcggtaagctcggcccccttgtattcacgttcaagctggttccatgcgagctgttcccatttttcaactgacggatcaaggtgttctgtatgccctttttcagcgatcgaggcaatgagaatgccgcaaaacaagagggcaagcacaaatggaagggatttcatctttatgttctcctgagtcgttttttgtcaatcttagcgtgtccaaagaagagacggatatgcggttttattttatgtctccctcatattgctatgccgctgtgataaggacaccaacttttcccccgttgcatcggtcttcgacggcataaactaacggagaacttctcattgaaaggagaagcgtaagatggatcatgcggattatgataaagccttatattacacacaccggtctcaatgggacaatttgttaattttgatggttcgtacaaaagatgatttattatcaaagcgtattgagtactttctgcacgcgtatcatttcgaatatgatcatgcggtgcttgaaaaagagctgtattcccttctcgggtatattgatcatgcgacagagctcgcttatgaagatcaattagccatgctgacataaaacaatcccggcgtcagacgccgggatttcttgtatttgtgaacatattcagctcttcgatcatctctttcaggctgactgccatatcctcagatacggtccggcgctccatgtcaatgtgaatcgggtctaagaccagctgtttcgggatgacatttgcataaacgccccgcatgaccgtccgcatattcgccagcgcgttcatgcctccttttcccccgcccgccgcggcaatgattgccaccggtttgtatgcccagtgatcgctgcttaaaaaatcgatggcgttttttaaagcgccgctcatgccgctgtgatactcgggagataataagacgacggccgccgactttttcacctgccgccttaactcttgcactgcgggcagctcgttctgttcttcttcaccgttataaagcggcagttcactttcgctcaaatcaataaaatcggtatgaaaccgatctcttatataagaagcggcaattctagtccgcccgttttttctcggtgtgccgctgatcactaatatgctcatcattttaccgcctttccaaaaacattatattttaccgcatacaatgccgcctgcgtccgatcggaaagattcagctttgacagcaggttggacacgtgggttttcactgttttttctgaaataaacagtgccgccgcaatttccttattgcttttccctttggctatttcttgaagaacatctttttcacgaggggtgagctgatcatatttttccttatcctgatcgtcctgaaccatatgggtcagcacgtgaggcacaatatccgccgacagccggtaacgtccggaatacacttcccagagcgttttcactaaatcatcgggctgggcgtctttcagctgatacgcttttgcgccggctttaagggcgggaatgacatgctcctgatcagaatagctcgtcaaaacgacgatactgatgtccggaaatcgttcagccgcaatttttgccgcttctatgccgtccatatcaggcattgataaatccatcaaaatcatgtccggctccgtcttttcagcttgctgaagcgcttcagcaccggtggacgcctcaccgacaacttcaatgtcttcctgagtggcgaagaaatagcgcagtcctttgcggacaacgtgatgatcatcagcaatcggcgagcgtataagacccgtccggctcaatcagaaaaatccaccctgtctgcagcccggtcaggctgagcagttcgcgaagcactttatcaagcgcttcctttaaatcgtggctttggtttaaggtttccgcaatcgcttttaacgtttttaacgtttctaccgtcgttttcgtcaatttccctcactccggccaatcagaattatccatattatatcaattcttttctgtatattcctttgttttcagcatgaattttcctcatactttcggatgaggcgtataaaaaaaccgccggaagtcgcttccggcggtttgttgtttatttcgttttttccactatgccatccaccgttttcatgacggcttcagataatgcggcaagacgctgttcgctgtcttgtaaagaagttcccttcacggcgaaatagaacttcactttcggctccgttcccgatggacgaaggcagaaccaagagccgtcttcaaggaaatatttcaggacatttgacttcggcagatcaatatcttcttcatgatgatcggcaaatacagtccgttttcccgttgaatagtcttcagcctgcgtgatttgttttccggccatctgcttcggcggatcgtttcggaaggaagtcaggatagcggaaatctgctctgctccctgttttccttttaacgtcaatgacttcaagccttcacggtaatatccgtattctttaaaaatggacagcagcgcgtcataaagcgacatgccctgctttttataaaaggcgcatacctcgacggctaacagcgcagcctggatcgcgtctttgtcacgcgcgaaatcgccgattaagtagccgtagctttcttcatacccgaactggaacgtgtattggcctgatttttcatattctttgatcttttcaccgataaatttgaagcctgtcagcgtgtcaaccgtatctaatccgaacgatgaagcgacggcgcggcccaattcgctcgtgacaatcgttttcatgacgacaccgttttcaggaagggcgccctgttttttcttctcggaaagcaggtaatgcaataaaagcgcgcctgtctggtttcccgtcagcactgtgtacttgccttcgctgttttttacggcaatgccgagacggtcggcatccgggtccgtagcgacgagaatatcagcgttttgttcttctccgagtttaatggcatattcgaatgccgcgtgctcttccggattcggcgatttgacggttgaaaaatccgggtccggcagctcttgctccttcacgacggtgacgtttttgtaaccgagtgcttcaagaccgcggcgcaccggtttatttgccgtgccgtgcagcggagtgaacacgacgctgacatccacttcagccgaaagttcgggatgtacggagatggaagtcagttcttcagtatacggtttatcaatttcttcaccgattattttaatcaaacctttttctttcagcgactgttcatcttcaacttgaatcgttaattcattttctatggcattcacttccgcaatgacgatgtccgcttctttcggcggcagctgtgcgccgtcatcgccatacactttatatccgttatattcaggcgggttatggctggccgtcacgacgataccggcataagcgttcagctttctcaccgcaaaagacagctcaggcgtcgggcggagctcatcaaatacgtatgtttgaatgccttgggaagcaagggtttttgcagcttccatcgcaaactcaggagatttatgacgggagtcgtatgcgatcgcaacccctctttttttcgcgtcttccccctgtttcgcgatatacgccgcaagtccggcggatgctttgcggaccgtgtaaatattcatcctgttcgtacccggcccgatttctcccctcatgcctcctgttccgaactcaagatttttgtagaaaaaatcttccagcagctgctcgtttccttctgcgtccgccaataattttttcaattctgaatctaattgttcggcctgattccagcgttcgtaactcttactccaactcatgttcgtcctcctataatttcagcttatgaccatattttaatatgaagcggctgcccgtgtcacttgataacttaaccaaatgctttatgtaaaaagataaaagaagggctcatgccttttcggcacagccctccggttattattgttcgagcggaacaaccgcgtcgtgcagcagcgtatttaaccactcagtgtgtttttctttcgttttgtcattccattggaatcggtcgctcatgtaatcaatcacggctgttttatacgtttgcacccatttgatgtcgaagaacagtcttcccgttctgcggacgaagaaatcggcaggtgtcgcagccatttcttcttcgatgctgtaagccgcttccgccagaatgtgaaccggaatctggcgtttttccgcttcgtctttcagaccttcaatccggctgaatacattttcaacgttagagccgtatctgatggctaactgcttagcggtttcctgtgataaaccgattttcaagccgtcttttgtctttgcttccacaaatgactcgaagtttttagagccgccgacatgtccgccggaaatcggcatcgtcttcgtcttgcagccgccgaagtcctggccgccctcttctttcaagcggtcgcggacaagatcgacaatgtgctcagccattttacggtagcccgtcagttttcctccggcgatcgtaatcaggcctgattgagatgtccagatttcatctttacgggagatctcagacgggtctttcccttcttcgtgaataagcggtctgaggccggcccagcttgattcaatatcgtccgccgtaatgttcagttccgggaacatataattgatggagctgacgacataatcgcgatcctgcaccgtcatgcgcgggtgctcaagtttttgtttgtaaaccgtatcggtcgtacccacgtatgtttttccttcacgcggaatggcgaacaccatccggccgtccggcgtatcaaagtacaccgcctgtttaagcgggaatacggattggtcgaatacgagatggaccccttttgtgtgctgaagatgttttccgcttttgctgtggtctttttctctcagctcgtcgacccacggacctgtcgcattgacgatttttttggcgtaaactttgtattccttgcctgacagcagatcttcaattaaaacgccgacaacttttcctttttcataaagcagttctttcactttagaatagttgacaggctccgcaccgaatttaacggcttctttcatgacttcaatcgtcagtctcgcatcgtccgtccggtactctacataatagcctccgccttttaagccgtcttttttgacgagcggctctttttgcagcgtttctttagcagacagcatgcttctgcgctctgatttttttactcccgctaaatagtcatacacacgcaggccgatggaagtagagaatgaaccgaacgtgccgcctttatgaaacggcagcagcatccattccggcgtcgtgacgtgcgggccgttttcgtacacgatggcacgttccttaccgacttctgcaaccattttgacttcaaattgcttcagataacgcaaaccgccgtggacaagctttgtggatctgcttgatgtgccggccgcgaaatcctgcatttcgctcaaagcgactttcattccccttgaagcagcgtcaagcgccgtaccggcacccgtaatacctccccctataataaacagatcgtatgtttttttagtcatgtcttccagcatatgatcccgttccaaacttgaaaattggtgattcatcattacgtttcctccttgttgtcacggtatagaaaaagagaccacaacagccaaagcgcagttatcactttggtgctgtggtctctcctcatctcaggaccgttcctattaacttgttttcagtataccacatttttatcttatttaaaagccatagctgcatttactgcttttttccatccgccgtacaattcatcgcgtttttcatcttccatttccggtttgaattgcttatcaaggttccattgatcagcgatttcagtgctgtccttccagtagccgacagcaattccggctaaatacgcggcaccgagcgccgtcgtttcattaatttccggacgttcgaccggcacatcaagcaagtcgctctggaattgcatgaggaagttattttttaccgctccgccgtctacacgcaatgtttttaaagagatgcctgaatcagcctccatggcatcaagcacatctttcgcctgataagcgagagattcaagcgtagcccggatgaaatgctccttcgtcgttccgcgtgtcaggccgaaaactgagccgcgcacgtcactgtcccagtacggtgtgcctaatccgacgaaagcgggcacgacataaacaccgtcagcggaatccacacgctctgcgtatgtctcgctttcttttgaatcttggaacatccgcatgccgtctctcagccattggatagcagaacctgcgacaaagatgcttccttccagtgcatactcgacttttccgtctaatccccaggcgattgtcgtcagaaggccgtgatcagaagtgatggctttttctccggtattcatcagcataaagcagcctgtgccgtatgtgtttttccccatgccttcttcaaagcacgcctgaccgaacagcgcagactgctggtctccggccgctcccgcaatcggaatgtttttaccgaagaaatgataatcaaccgttttcgcgtacacatgagaagacggtttcacttccggcagcattgatttcggcacgcctaaaatatcaagcagctcgtcatcccattttaattcatgaatattaaacatcagcgttcttgaagcgttggaataatccgttacgtgcgccgcccctccggacattttccagatgagccatgaatcaatcgttccgaatagaagatttccgttttccgctttttcccgcgcgccttctacattgtcaagaatccatttgactttcgttcctgagaaataagggtcgatcaaaagtcccgttttttctctgaatgtatcattatatcctttttcacgaagctcttcgcaaatgccggatgtttgtctcgattgccagacaatcgcattgtataccggctttccggtatctttatcccatacgaccgtcgtttccctttggttcgtgatgccgatgccggcaatttgatcagcgctgattccggactcggaaatcacagtcgcgataacggcgagcaccgatccccagatttcgttcgcattgtgctccacccagcccggctgagggaaatgctgtgtgaattccttttgagcggaatgcacgatttttccttctttattaaaaagaatcgctcttgaacttgttgtgccttggtcaattgataaaatataggtctccatgatgccgctctcctttttaaatatattcagaatttgataatgttttccgtgattgagatttcttggtataaatatagagtatgaaaagcactacaaccattataacgcttacaaaccaaaagctaggtgtcacatttcctttaaacgcggcattgtaaaatacgccgccgaacgcaccgcccatgatcggaccgattacgggaatccaggcatatttccaatttgaaggcccttttttcgggatcggcagaaaggcgtgagcgattctcggccccaaatcccgcgcagggttgatcgcatatccggtcgtccctccaagagaaatcccgatggcaacgatgaggaatccgacaatcagcgggttcagcccttttgtaaattcattcgctccgattgccaaaatgccgagcacaagcacaaacgtaccaatgacttcacttatcatattcccaaatgtatgaggaatactcgggccggtcgagaaaacgcccagtttagcggccggatcatccgtcgccttccaatgcggcagataatgaaggtacacaacaaccgcaccgatcattgctccgatcatctgtcccgcaatataaacagggacgtctttccaaggaaagctgccttcaagcgcaaggcctatcgttaaagccggattcaagtgagcgccgctgatgctgccgacggcatatgccgccatggctactcccaatccccagccgaatacaataacaatccatccggattggtatgaaagcgatttctttaagttgactcccgcacaaacgccgccgccgaaaataacaagcagcattgtaccgattacttctccccaaaatgctgtcatcatcattcctcctaaatgacataatagcaggtttgacagagttatagagaataaaaaacccacaacaaaccgctttacgctttattgcttccgtaaagagctgttgtgggtctccgggtctccatcacatagtattaacctaggtctattgtaacaatgggtgtaagcggtgtcaatctttttttgtcatagaatgttcatatttagcccatagttcggtgtctgaagtcgtcacggccgtggctcctgcctgcaaggcgttttcaacgtcctgctccgtgcggatgaagccgccggcaaaaatcggaatccccgtcatttctttaatttctctgattaaagtcggaacgatgcccgggagaacctcgataaagtcaggcttatgctttccgacgaattccatgcttttctccatggcgcttgtatccaagagaaacagacgctggatcgcgtatattttcttttgtttcgctttgacgatgactgatgatctcgtcgaaatgatgcccgcgggccggatatcctggcaaatgaactccgcaccgtattcatcatgcttaatgccgtggattaaatcgacgtgaaccatcagaagttttccgtgtttttttgcttcattcacaacaccttttaattgaccgaggtggatatctaaaatgacgccgtataagaacggactttctaaaaatgcatcgaattgcttcatgttccggattgccggtagaatctgctggttgtgaaaactcatgttttactcctttacattaaaaatcaatgctcagcacgctttccttgacggtcgaaatgatgaaagagagctcctcgtccgacaggcaaaaaggcggagacagctgaatgacattattatatcccgctacagtatcgccatttttcccgacaagcaggcctttttctctgcacgcggtgatgacgtgctgcacaagggcggcatcagcgggttccttcgtgactttgtccttgacgagctcaatgccggcaagaaggcccttgccccgtacatctccgaccgccggatgttctctgagcggctcaagctcacggagcagcctttctccaagctcccgggagcgggcgatcaaattttcgtcctccatcaattgcaggtttttcaaggccagggcgcaggctgccggattgcctccgaatgtattcacgtgccggaagcggccgtacggctcaccgcccgaatacgcctcaaaaatctcccgttttactgccgttgccgacagcggcagataagcgctcgtaatgccttttgccattgtgacgatgtccggtgaaacgccgtaatgctgaaatccgaacggctctcccgtgcggccgaaaccgcaaataacttcatcactgatcagaagcgcgccgtggcggcggcaaatgtcctctacctttgccatatacccgtccgggggcatcagtatccctccgcctgtaataatcggttccataataacgccggcaatcgtttcgcttaactcccacgtcatgatccggtcgatgtcatgcgcgctttccaatgtgacggcatcgccgggattccgataaagatcaggcggcgccgcgtgcaaaaaaccttgtgagagcggctcatatttatattttctctgcgcctggccggtagcggcgagcgcccccatcgtattgccgtgatagcctctgtaccgggagatgaatttgaagcggctgtgatcgccgttttcaatgtggtattggcgggcaattttgaacgcggtttcatttgcttccgatccgctgttggaaaagaagattacataatcgccgccgagccattcattcagtttttccgcaagctcaatcgcgggttgatggctttgggtcagcggataataaggaagctccttcaattggctgtaagccgcatcggcaagttcctttctcccatatccgatattgacgcaccacaggcctgacatgccgtccaaataccgtctgccgtcaatgtccgtaacccaggcgccttcccctttttggacgattatgctgtcatccggctccgcccctttcatcgcgtgccaaatcagctctttatccttttgtttgagtgactgatttttttgtacatgttccacaccgctcatctccctttcaatatcattgcactgtatcgaaagctgcccggcttctgacgccgattctcttggtgaagttttcctcttaataagaatataaaggcgcggcatgggcgagtcaataaagcggcggcaattaaaaaaacgctttctcccagaaagcgaaagggctacaagagcatatcccgaaaccggggccggtgcaagtgtttttataaaaaaacccgccccttaagcggagcgggcgtttttttatttcagatgcgtaatccggtaaatgtctttgcgccggtctttcagctggcgcacggttccgttttcacgctgccttcttaagatttcaaggtccacgtccccgatcacgaccatttcgatattcggattcgtttcaccgacgattccgtctctggcaaattcaaaatcagacggagcaaaaatggctgactgcgcgtattgaatatccatattttctgtttgcggcagatttccgaccgtacctgagatgacggtgtaaatttggttttcaaccgctctcgcctgagagcagtaccttacgcgcaagtagccttggcggtcttcagtgcagaacggcgtaaagataattttcgccccttgatccgcggcaattctcgcaagctccggaaattcgatatcgtaacagatctgaatggcgatctttccgcagtccgtatcaaatacgcgcaccctgtctccggcgctgatgccccaccatttccgctcattcggcgtaatgtgaagcttatattgtttttcaatcgtgccgtcacgtctgaataagtacgcgatgttataaattttaccctcttcttcaacgaagtgggagccgccgatgatgttgacgttatatttcaccgcgagatctgtaaagaggctgatatagtcctcggtatattcggtaatcctctgaatggccagactcggagaacgctcctcgaggaaagacatcagctgcgtcgtgaaaatctccgggaacaccgcgaaatcagatctcgcatcggaagccacatcgacatagtattcaacctgattggcaaattcctcgaaggagtaaatctttttcatttcatattgaatgacgcagatgcgcaccggaaatgccgatttgtaatagcgcttcgattgcggcaggtaatcgacattgttccattgcattaatgtcgcatatttaatggacgcggtgtcatccgggagataattcggattgatccgcatgagcgtaaatccgttcatcagctggaaagaaagcaccggatcataaatctgatggcgcgtcacctgttcgacataagctctcgccgtcatttcttccgcatacttatgataattcggaatccgcccgccgataataatgcttttcagattcaatcgtctcgccaagtcttttctcgcctcatacagccggtgtccgattttcatccgtctgtattccgggtgaaccattacctcaatcccgtacagattcaatccgtccgggttgtggttcgtgatataaccgtcgtctgtaatgtcctgccacgtgtggcggtcatcatattcatcgaaattgatgatcaggcttgagcatgaaccgataatttccccttcgtactcggcgcaaaactgaccttccggaaagtgcgcgagatggctgattaaatgctcaggctcccacggctccatccccggaaaacaatccttttgcagctcaataattttgttgatatctttctcttccatattccgtatgaccattttcttttcaaaacgggtcagatcaagtttctcagacaatgctgcttccccctgccggttcgttttgatcgttcaatcgctgtaagagtaattcaagttccatttccgccatcgattccagtctgtgatcgtattcttcaaataacagggcgcttgttaccttattcggcacgatgacacatttcatgccggcccgtttggctgcgatagagccgttgaccgaatcctcaaaggccagacattcagatggttcaacgcctaaatgttccgcagctttcagatagagctccggattcggcttcacttcttctacgtcgtcagccgtctgaatcacttcaaattcatcaaacaggcctaattccttcagatggcccgatacccatttgaaatctgagctggacgcgagccccactttcaatcctaattcttttgccgcggctaaataagcctccaccccgggacgcgccgtttccgtcttcatccgctgttcgaagcgcccgcgcctgatcgccgtcagttcatcatgatcgagctttcttcccagctgctcctctaaatatgcgaacggcttaaaccccgcggccgttccgatcacctttccccagacggataaaggcaatgttgaaccgtgttcctcaaacatttcctgcagcacttcatattcatgggtttctgtatctaaaattaacccgtcaaaatcaaagattaatgcttttatcaatggttacagctcctttagctaaacgtactgacctatgtatacactataccgtgaatttctttcgcgttcaaaatgtaacattctcacggaaagaagagcctgcatgagtgcaagctctcttcatccgttactgtgtgttttgactggaaatattggaaagagctgctcccgcagactcatttgaacgctgatcgaccgctaagtctccaagcgcaacgatcccgaccagatgattttgatcgacaatgggaaggcggcggatttggtgttgggccatcagatgtgacgcctcttcaagactcatttccgggtttccggatacaactgcagaagacatcacgtgtgaaacaggtgtttggccgtcgcggccttgagccgttgttctcaatgcgatatcacggtctgtcagcattccttttaattcccctccgtcaacgacgggaattgctccgacattatgctggtgcatcagcgcagccgcttcctgaatcgtttgattgggagaaacggtagccacgtgggtagtcattgattgtttgattgaactcattgtaaagcacccctttcgacatttattatgctcggggatttgtctcattataaagggagttagaggaaagaaattgtggtatcatgtcaaggaagcaaaaaagagcctgtcaaaaggctctttatacccgtcagatcagccttctgtgaccgcaggcttctgatccggcccctgtctcgaaatcatcataggtaaagggaaaattcattccgcattcattcagcaaagcgcaatttttatcaaacagcgcccgctctttgacgtcatataccgggtgcggctttgacagcatgatatgtaccgtttgcagacaagccataatttgaaacgcttcttttaaagttccttggtaacgttggttttgtaatgataatacgcccctttttttaaagcgctgaatttccagttcggagaaataaagaggaaagacattttgaaacaattcagaggaaagctcttgtatcgcgctttcttgtccgtcagtcgctgcgttcacaattctcacatcaatcacctttcttgccatgtgaatatccttaatctttatcaagaatagcatagaaaaaaacgcgaaagctaaggtaagtgtttcctattgaaacagccgctttccgcttgaaaaggagctttatgatatgaaacaaaatgaccgcggtctggaactcctgattacggaaaagcacgccggacaatggctgttttcagtcctgaaatctgaattccaggcgtcaaaacccgtaattacggaatggatgaaccaagaaagcattcaggtgaatcgaacatccccgaaaaacaacatcatactgaaaaccggagatcgcttattcattgatcttcaggaaaaaacgggttcttcggtgactccggaatacggagagccggacattttatttgaggacaatcatatgctgattgcaaataagccggcgggaatgccgactcatccaaatgaagagggtcagaccggcaccctcagcaacctgatcgcttaccattttcaaatcaatggcgagcaggcgaaagtgcgccacgttcaccgtcttgaccgtgacacgtcaggcgcggtcgttttcgcgaaacaccgcctggcccatgcaatccttgaccgtcagctcgaaaccaaaacattaaaacgcacctatatcgccgcggcggaaggaaaagtcacgccgaaaaaaggcacggttgactcgccgatcggacgcgacaggtcacattccgtcagacggcgcgtctcacccggcggacaagccgccgtcacccattacaaagtgaaaggctatcatcccggtgcgcagcttacattggcagagcttgaactggaaaccgggagaacacatcaaatcagggtgcatatggcaagcatcggccatccgttggcgggcgatgacctgtacggcggaagcaggacgctgtttcacaggcaggcgcttcacgcaaaaaaagtcagtgtcgtccatccgatctcaggagaagaaatcgttgccgaggcgccgatgccggctgatctggctcattttaccgaaacgtatttttcttaaaccgggtcggcatatataatatatcgtttcggcgcatttccaatgtaagaaaacggatagcaagtggtcaggatcagttcctcccgtttgtgctgaagggtgatgacagatgtatcatcccggctgacaatttttgtacggctgattttataagaaaacgtgccgtaagacaaaatcacgttcagtctgtctccttttttcaattcgccggtcctgcggaacaccgtgtccctgtggccggataacacaatttggccgtgatcgcccggataatagctgtccttataatgtccgacgccttttgctaaatcatctgcgtcagtcccttccacgatcgggagctcagcgtcgatttcagggatttctaaaatgccgcttgcctcacccgtttcggggtgaaattcttttttgcgctgtgtcagcacagcgctttttgtttcgttcttttccaagacaggttctgttgctttttttgcttcttcaagcgaatggttcgttttcatatgtgaatcaatgatcttccagcttccgtaacatgtgatgatgataccggcgatgatgacgaaaagcggaataagtttcagtttgttcatcgtgtgcggattccccttttctttctgaaaagccaatatacgccggcacccgtgatcaccagaccggccaatgccgtctgatggctgcccgctgaagtatcaggcaatgggcggcctttttgtgtgccgctttcagtctgttttgtgctttgttccgaatttgcggcagacgccggacgggattcgggaattgactgcactgtatcagatgctgtttcttctgcgacaggacgttcaggttttttggtttgatcaggctgttctgccgcatccggttttttagcgggtttttccgcttgaggtttttctcctttatcaggcctggtgccgcccggtgtttccccgcttcccggctgattgccggtgtcatcaggtgtttcggcggctgatgccgtgcggatgcggccgtcggtttgataagaaatcggtgcggaaaagcttttgacatagtctactgtcgcttccaaatcctcaggccccgtcaccggattcttgccgagtttcccgatcggaccgtattttgcccccgctgccgtcgccataaattgattgactgttactgtatatcctttttcgggctgtatgtctgtcccgtccgccatcttcatatcaaccgcttgtccggtttccgggttccatgtataggaaaatccgctgatgctgtaatccggtccgtacaccggagaaatttgcgcgttaatgatctcccgcaaatcttttcctttgatttcaagcttcgtcagcacattgccgaacggctgtacattataaaggtctccccatgtaatcgtccctttttttatgccgtcccggatgcctcccccattcataagcgcaaaatcggatttcatcttcgctttcataccgtcggcaatcagatttccgagcgccgtgtcgccgtcatttgaatacccgcccgttatatcatgggccgcttccccgaccgcttcgctgataatcggtttcactttctcttcgtatttgcttaatatgcctgccgcaaccgggtcaggcttgattttgctttgatcgatatattggatttccgctgattttttcacgatatccttcgactctttatcaagttcaagatcggcgattccgattgcttttccgtattcaaatgcctgcacgatcagcttgccgtcgatttctccgtttacgactttatgattgtgcgcggcgaaaatcacatcaatctctgagtctgttccgcttgcaagctttgcggattctcccgtgatggctgagccattttgttcagcagacatatgggcgagcacggcgattgctttaattccttttttcttcaggtcagcggcggcttcattgacggcctttacctcatccgtaaacgtaatatttttaattccgtccgggatgaccatgcctgccgccgatctggttacaaccccgataaatgcgaccggaattccggaaacgtatttaatttcatacggcggcagaaaggactcccctgacttcaatttacagttggcgcagacgagcgggaaattttggccgtcataaccgcttgtccccttaccgtccggatgatctcctccattgatgatccgtttaagctcattcgttccttcatcgaattcgtgattgccgacagttccgacatcaaaaccgatgtcttccatcaattctactgtcggttcatcctgaaaaagggctgacacgggagagctgcccccgatcatatcgcccgcatgcacgacaaaggcgtgttctttctcggctttcgcctttttaatgtacgctgtggcgtagtccatccgcccgaacgtgccatccggtttaccgtctccgttaaggtcaagctcatattgctgatcaatttttccgtgcagatcattcatgctgatgattctgagtgggacacggccggagtcttctgtctgctgttctttatacgctttatccgtgccggcttcattcagtgatccggcttgtccgattgcttccgcatctttcacgctgaacatcaaaaaacaaaccgtcagcaaacagcacgaaagacgcatacccctttttttcttcattcatttcccccctgtcttctaagaaatacgttagcttattttcttaaaaatcacatcacttttttgtaaagattgtcttcgccggcgcaaaatagtaaataatccccacgtaacgaaacaggacttgatgtataacggatcggcttttttcacatcttaatgatgatttgacatgaaggaggaaaacaaccagtggaacagcagcagaatcagcagcagccgccagtaaatcaagggatcccgggttcaccgcaagtgaatcacggaggacatgagcttttcgatatgcatgaagtgctggccggaacagtcggcgttttggatcaatttatgatgctcagacagtttatacaggatcagcagctggccgacatccttgaccgccagtatcaattcattctcggactctataatctgacggcagaatgctttaagaccggccaaaagccttctcaggaaacgtcgacatatatgatgaaggaacagaaccaggccgtctacggtataaaaccgactcagccgaaaaaaccgaatcaatcattaaatgatgtcaaagatctcgggatcagcggccatatgctcggcctgattaaagctcaagcttctctcttgacgatgagctcgcttgaaatgaccaatcccgtcactagaagagtgctctccgcccaaattcagcaatatgtcgaaatggcgtatgaaatcttcttataccaaaacaaacacggttattatcaggttcctcagctcaatgcacaagatatgcagaccatgctgaattcatttgcaccggcccagggacagccgcaaatgcctccgattaaaggacaaatgggacagcagcagcaaaacctccattgattaaaaaacggcgttggaaacctgactctccaacgccgttttctttttttcatatgcttttgtgaaatcatgttcaaatcgtttcaggctttctttcgtagccgcttcaaagcctttttcaaaatcctgtgtttcggcggttttattgataatggttaagataatgccttctccgaatgtttcggttaagtcctttatcatatagaagctttgcaaatagacatccgtttcatattccatacgcgatttctgccattttcggtcggtcgttaattgatcaaacggcacgacggaaaatgcaatcggatcaatgactacatcataatgcgcgacccactcgctcaacccctcatgaaaccaaagcggaaatacagacgtatccgtccccaattgccgcgttttttgatgaaacgcatagtgtgtatattcatgtataatcaattgcttatacatgaaaacggccagctcatcttttttcaaaagctgttttttctcttcaggcaaaagccccatcatctgctcctgttctgaataaaaaccgactacatttttcaatcctgaatattgctccatttcatcttcatccgaaaagaaaatgagttcaagcggcgctgcacctttataaccgacaatgatttgattgatacgctttgcgtggtccagcgtaagcttggtcagatccaagagcggcttttcatccgccgtatagtaaatcgctgtatgtttgtaaatttctttattcatgtgttcagtcacttgttccttcgtcggaacagagcggctgttttggcctgacaggacgtacatcatacttactgaaacggctgaactgacagccaatatgacaaggactccgcacaggatcagagtgaatgccgcccgtttccccatgccgtcacgcaaacaagctcccctccccgatcctttcattttcatctcattctttactttatgctcaggagcgctgggtcgtgacggcagataaaataaaaaagccgcagcaaatgcggcttttccattcatttatttattggggtttgggaatacacgctgcaccatttggccgaattcatcaaacagaccggatacaggatgtccgttttggattcgttttccgtagccttgcatgcgttcaacgaagtccgggttcgctgatacatatacagtccggacatgtttatcggctgatttcaccttatcggtaatcttatttttcaaatggttggcgatggcgcctttttgcccgtttgtcaaaacaacggcaacatatgcgctgtttccggcaacgatcacagtcgcatttttaacctcttttaaatcagtcaccttgtcggcggctttatcagccactctcaggttacgattgtcattgtgatcggtgttttggttatgacggttcactgtattcatatttgtcgcaccgtcgttaggcgtgttgcggtaatttacattctgggtgcggttgtcatttcgttttccttctccttggttccccatactgcaccctgcggtaatcagcatcggcagaagaagggcagagataactgcttgtttttttatcatgtgaattcctcctttctcactttacgtataggtttttctattcggcgggatttatgcacgccgtttgcattctgaacggtttggataaatatcagaaggaaagggaaaggtaagcgtaatcaattgaatgaggagggatttaacttgttcagaaaaaaaagcggtatcagcccgacagcgctgctgatcggatcatcgattctgattgcagctttatcacccgaaatccgccggaaaatctccggaatggtttcaggcagaatgcagcataaagatggcacacactccatgcagcctgctgacctgattcaacaggctttcggcggggaatccggcggacagcagcacgcagacaaagcccgacattcacaaaccggctcattgcagcctgccgagctgatcaaacaggctttcggcggcgaatccggcggacagcagcacacggacaaagcccggcattcacaaaccggctcattgaagcctgccgacctgattaaacaggctttcggcgacgaatccagcggacagcagcatgagcagacttcccgcaatcactccggctcatcccatacggacagacaggcagaccgcagccgcagtaaagaaacttcgccgaagcctcactataccgagccgattcacttcgaagaaagcgcggtaaatgttttaaatgacagcaccgtgatgaatatgctggaagaaattgaacccggaaatcattagaaacgaaaaaaaatccttcattcgttcaacgatgaaggatttttcgttttagcgctatctgcttttttattaagcttcttcagtttcaatgacgattgtggaatcattgtacaccgcggtatcggtttccttcgtcattttacttgttaacagccctgcggtcatactgccgctgacatttaaggcggtgcgccccatgtcaattaacggctcaattgaaatgagcagtccggcaagcgcgacaggcatgttcaaagcggataggacgagcagagccgcaaatgtcgcgccgcctcccacgcctgctacaccgaatgaactgattgccacgatggcgatgacggaaatgataaatcccggttcaaacgggttttgccctactgtcggcgcaatcatcatcgcgagcatcgccggataaatgccggcacagccgttttgaccgattgataagccgaatgaaccggcgaagttcgcaatgccttccggtacgcccatgcttttttgtgttttaatattgagcggcaaagcccctgcgcttgaacgggacgtaaacgcaaacaccataaccggaaaagcttttttcacgtatgtgatcggatttaaaccgctgaacgtgatcagcagcaagtgaatgataaacatggcgataagcgcggcgtatgaagcgatcacaaacatccccagtttcgcaatgctgtcgatgtcgcttgtcgcgatcgttttggtcataatcgccaataccccgtaaggcgtcagtcttaaaattaatgtcacgacgcgcataataatcgcgtaaaccgcatcgacaattccgctgaatgtcgctgcgtgctccggctgcttccgtttcacgcccagaaaagcgatgccgaggaaagcggcgaaaataacgactccgatggtggaagtcggtctggctcccgtgaaatcaagaaacggattccccggcagaagctcaacgatttgctgaggcagcgttttggccgtcatatcctcagatttttgctgcagctcctgaccccttgataactcagtgctcccctggtcgatatgaacggctttcagatcaaaggaaagcgccgaaacaattccgactgccgcggcaattgctgtcgtagcaatcaaaattccgatgatcagtccgctgattttcccaatgttatgggtcagtttaagcttcgtaaatgcgccgagaatagaaataaagactagcggcatgacgatcatctgaagcaatttgacataaccgccgccggcaatattaaaccaatcggccgtttgtgtcacgacatgtgaggccggcccgtaaatcaattgcagtgcaaaaccgaatacaatgcctaatccgagtgcggtaaagacacgtttagaaaaggaaacgtgttttttttgcatcacaaacagacctgctataaacaaaaacaaaataaaaacatgtaagattacaaataaattctccaaaacaggtaaacactcccttgctcattatccttaaacactatattacatcaattccgatcggtcaagtaagaattgacaatatatgtatttttattgatttttctcttttctttccatcctttctttagtaacttatataagggtgattgttatgctgaaggaactgtttcttaatttgacgattttaatcacatttaattatctcttcaccgttctttttaaagagtcgctttcacataaagaagaccgtccggtgtttcaattactgaaggggacggtctgcgggcttttaggggtttttctgattgctttcggcttttcttactccgattccatcattgatctcagaaatatccccattatcatcgccgctctttacggaggctgggtgtctacagcagctgcctttatcattatcgtggcaggccgtatcctgatcaatttcaatgccagcgccatttattctatcgccgcggtcggcatgattgcgatactttctgtggccgtattcagaggaaaaaagccgaatcacaaaaatgcgttcgttatgctgctcttttcaaatgttattatcaccctgacgctgctgttacttatgcctgaacagcctgccggggccctcgtttatttttggctcatttctaccttgggcggaatgctgtcgctgtatatcattaaacacgaagccgatgcccgccttttgttcaagcaatacaagtttcaagcgaattatgattttctgacggggatttttaataagagaaaattcgaggaagtctcgcgcgttctgtacgatcgggcgtctcaatccccctcgtctcagctcgcgcttatttatttggatattgatcactttaagcagatcaatgaccaatacggccattatgaaggggaccaagtgctgaaggaactgggggcgcgcctgaggttcttactcagcagttctgatccgtcagcccgtatcggcggggaagaatttgccgtgcttatgcccaattgcacgtatacaaaagggcttcacctcgcagaagaaatcaggcacacgattgacgcgaacccgattctgctgacgagcggagatacaattcccgtgaccgtttccctcggcatcgcgcattatccgacaaatacatcggatcctcagacattgcccctgatcgcggaccggatgctgtacaaagcgaaaacatcagggcgcaatcaagtgtgcagcactgaaaaaaaagaatgatcgcccgaagaggaaatcattctttcttttcagtgagaaaaccgcccctcaggaaaacaggaatcaggctgccctcatattctttttcaataaacgccgcggtatcatctgattgatacaaagacaggagtttttgcatccgttcatcatctttattctcagctctgacggcgatcagatgaatatatgcttccttcatttgcgccgatcggatcagcgcgtccttctccgcatgaaatcctgctcttttcgcctcgctttgactgagaactgctgcgtcagcatgttccgccgcctgataggcgttcttttttgtttccgtttttaaggtcagatgcttcgggttgtccttgatcatatcagttgaacccgtaccggtgaatccctttttcaatgtcatcagtccggcctcctgcatgagaaaaagcgccctgccgaaggccgccgcttcaccaggcacggcaatgaccgctccgtccggtatatccttcagccgtttatgttgcttggaatacacccccagcgatgccgcatatgtcgttcctaaaggagccagcttctttttcatatgaggcggcaaagattgaaaataagaaacggattgaaacgcattggcgtcgagatccccaccggcaagcgccaaatcggcctcggcataatccgaaaacgttaccaaagaaagctgcaatccttcctcaccggcttttttcgcgacaaactcccagatcgattgatcagattcattgattccgatagtaattgtccggttcccgtcaggataatgacatgaagtaagtgacatgatcaaaatgaaaagaaacagactgtttataagccgcaggttcaagttgacctactccctatctatttttatgtacagaggcggcaccatggtattcgggctcatgattacatacaataccgattaaaaaaaaggttgtcaattgcttccttaagagaccgtaaagcggtttttatcagctgaaaatgggctgttctagtctcaaatcagatttccgtatcagagcgttcccctcttaaaacatgttatttcgaaaaaagttacatttagcagttgttttttcttcgaattactggtagagtaaaggtaattatttttgttcgaactatctttaagaagaaagttttgtaagagttttcgtcttggaagtttgttttagagcaagaatagtgaatttaagcgttatgtcgctttaggaggaaatttcatgttagaaggtaaagtaaaatggttcaactctgaaaaaggattcggattcatcgaagtagaaggtcaagacgatgtattcgttcacttctctgctattcaaggcgaaggcttcaaaactttagaagaaggccaatctgtttctttcgaaatcgttgaaggaaaccgcggaccacaagctgctaacgtaacaaaagcataaattgtttaaaaaccctgccggtgtacgccggcagggtttttttcatctaaaacgaaaagctgttttgcaaaggcaaaacagcttttttatatcaggtggcaatatcgcgttttaagaagacgccgaatgcgagcgccagaaaaatgatgaagtaaatcacaagcatcacaaccgaaaatgtcatcgtcatcccctctactaaaggagtcccgttcatatattgcgacaaatccgtattggcgaataaaatatatttggtccattcaaatttcgtggcaagaaatacagtcgccgtgttccccataaccaatagaaaaatagaaaatccgaccgctaatgagctgttccggaataccgcagacagcataaacgccatcgtcgcaagcataaaagcggagacagattcatagacatatgttttagcgaggaaagcgatgatattttgctcaaaaacatggccgtctttgtatacgagatgaacatcagccgcagtatctccccctgtaccgaaaaagaccaatcccagcagagcggagccggcaaataaaatcacaagcatcagcagtccgaacagcagcaccgtcatatatttagaaagcaaaatctgaaaacggctgagcggacggatagccagcagcttgatcgtcccccagttgaactcattcgccacgatgcctgcggcaatgataatcgtaaacagcccggtcaaaaccgtcatcatcgaagaatcagctacgtatgaccacactgtgtaccctgtatcctcaggaatattatgatccatacggtattgatttatcgcgatattctgtttcagactatcaatgacagtctgatttccggtttccttcatctgctgtttcatttctttgttttcggcctggagctcctgtttccaattcggattggcttcgctcgaggtgaaatggtttgacagaagcgcaaaaccgatcatcgaaacgcctaaaattacaatcatagcccacgtgccgacgcggctgaaaatttttatccattcattatagatcagcttaaacatattgaacctcctctttcgtcccgccggtaatctccaagaaacggtcttccaaagattttgtcatgattttcacttcatataagcggatgttttcacggacgagcagtgatatcacatcaggcacttcctgttttgacagcctgatctcaatgccgtttgtcttcttcatacagtcaaactgactcagaacggccagagcctcttctctttgttcaatatggaagaagtatgtatctttatcctcttttccttcatcccttactttttgaatatcgacaagctcccctttttgcagaatgccgattcggtcgcacattaactccatttctgacagcagatggcttgagacgatgacagccattcctttttcacgtgtcagctttttcagatggtccctgatttccctgatgcccgcgggatcaaggccgtttgtcggttcatccagaatcagcaccttaggattatgcagcaggctttgggcgaggccgagacgctgtctcattccgagagagtaggtttttactttgtcatgtattctgtcctgcaacccgacgagctcgatgacctcatctattttttctttcgtaacgccttttaccatccttgcgtactgctgtaaatttttatagccgctcaggaatttgtacagctccgggttttcaacgatggctccgacgtgcctgaccgcttttgcatagtttttcgtaatggattccccgcagattacgatgtctccctgagacagtttcattaatccgaccatcattctgatcgtagtggttttccccgctccgttcggccctagaaacccaaacacttcgcccgcccggacggagaagctcagatcatgaataatcgttcgtccttttatcgttttctttacctgttgcagttctaataccgtttccaattagaatcccccttctatttcgtgcgcctgcatgacgcttctgtaccattgcagcacggacattccttcctgttcccgaatttcttcgacctcgcgccgttcagcgattttcccttttatgaaaaccatcacttcgtctaacagcgtctcaatctcgccgatctcatgcgtggcaatgacgacgatctggctgtcaaaatcaatataagatacgagactgttgacaatcgattctctgacagccggatcaagacctgaaaacggctcatccagcagaatgacggatgcttttctcgacagggccaaaacgattttcagcctgccccggctgcctttggacagctcttttatcttccgcttcgctgaaagattcatttccgttaataggttatgtgctttttccagctgaaaatccgggaattgcgaatgataaaatgtgagcatatcaccgacggtcgtccgggcggaaaacatatcgtgttcggttaaataagccgtacgaaacagcatgttcctgcttactgcgcagtctcccatccggacggcgcccgatgtcgggaacgctagcccggcaagcattttaagcgttgttgatttaccgcttccgttcggccctaaaattccgtagattttacccggagacaatgaaaatgatacatcgctgaccgcgagcctgcggccgtatttttttgttacgcgttcaaaatcaagattcatcgtttgcttcctccgcatattgtttgatcccgtcgatcatttcctcaggagataaccccagctccgccatttcctgaataaagcgtttgaaaacgtctttagtcagcctgtctttcagctccgctttcagatcggacctttccgctataaaggttccctgtcctcttctcgtctccacgatccccagcctttccatttcactgtacgttctttgtatcgtattcggattcactttcatctgtacggccatctcccttacggacggcagtttgtcccccggtgaaagctcgtctcggatcagccggtaatatacacgatcggcaatctgcagataaatcggcttggatgactgaaattcattctccatcattacacctcaacctttcgattcagcagcatagaggccagcgcgagacagagcgccgcaagcacgatcactgccaggaagctgaaaagcgagatgtggacggccttcagctccaccgtccagccggtcaattttgtatagtgaaaatcaaaatccgcatacacttttaccggccataaatcatgttgagatgaagtgaaaggcgtaatgattttatcgtcaatataggtccagacaaacgcaagcacgatgcagatcacccaacggaggacgggaacatgttttaatgagtgaaaaacagtccaaaatacggccacgatcacagataaatacgctgaactgatcagcaggtaagcattcagtccggttaatgtgccggccaggggaatggtgtgttccagcgctccttttgcagaaagcatccggtacatccaaatgccgtaaccggtcagcgccagctgcccgatcaactgatacagcagtgaggccgtcagcttggaagccagcagataaaatcctccattcggattgtaaagccacagctgattttttccttctttatgaaggtgatagtacataaaaagcggcgctacaagaaattgaaaaaaccccattgccgtaaaaaagccgaaaatgacgagcggttctttctgacgggcagcgatgacgtgggctgcaaacgcccagcaaatcatgccgcaaagccacaccgcgagccaaatccatgaaactttcgcatcttttttcagcaaacctaaaaacgatgtcattctttctctctccattcggatcaagtgtatgagtaacatagtacactagatcatcacgtattacaatatcttcaataaaaaaaaagacaaatccgctcttacgcagatttgccttttcaattacttctttttgttttttaaggagagcagcgcatcacgatagctgctatcctgcattttgccgccgctatcaggatcgtttggttcctgatccgtctcagaagtcttaaacttctgaagcgcctgacggtacacatcatcgcccattgtattctttttctcacggggagattcagattttacaacgacgggagcatgctcggctgagcgctcctcggccggatcatgcttttccggctgttcggctgtagtgccgatcgcttctctcttttcttctttgacatcctgtcctgcagaagtgctgcggacattgaatgtgataagaagtgcaatcacaatgacagcagcaataaccgctataataatggccatataaccctctccttactgtcgtccggcagttagattacctgtgacttggctgacacgtctgccaagcgcacggcctaattgaaggccttcttccgtcatcagcacatcgctgtcaaccgggcatgtgacgcccgcaccgtagtaagagccgtacagcgcgttttcaggaacgttgccgggaagtccgacaacaatcatgccttggtgaaacataggagtgatcagattgtgcattgtcatttctaatccgccatgtgttgtcgccgtcgtacagaatacggcgccgactttatcaatcagctcgccttcagcccacagatagccgagtctgtcgatccacgcttttaagcctgaactgatggtgccaaagtgtcctgggcatccccagataatggcatccatgtctttcagcttgcggatgtctgcttgatcgacatggtcgatcaggacttcagcctcagcgttttctcgtgctccttcggcaatggcttcagcaaggtgttttgtatgttcgccttcactatcgtacactacgtaaattttcattcaggaaacctcccattcagatgattaagattccttcacttctttaggggccggaagcaatgacagctcctcttttttcttcgcccgctgtttgtctttccgtacgtcacgcaagaacaggctcaggactacgccgataaccgcaaagatcgtcgcccacataaacgcgtcattaatccccataacgttggaattaagtgaagctgttttgtagagatatgaataaacggtttgtttcgccgcatcaagcgacatgttcatgttgaccattaaattcgaaaccgtgctttggaacgactgcatgaagcttggatcagccgtgctcgttttatccgcaatctgcgaatagtgcattgtcgtacggttcgtataaatcgttgtgatcaaacttgttccgattgaaccgctgatctggcggagcgtgttgctcatcgccgtgccgtggctgttcaaccgtgccggaagctggttcattccggctgtcataacaggcatcatcaacagtgacataccgaatgcgcggatggcatagacaagcataatgtgcgtgtaaggtgtgtcaattgtcaattttgtgtactggaatgtcgttgcgaccgtgatgaccagcccgataatcgcaagcggtctcggaccgattttgtcaaacagaataccagaaatcggcgacatgatcagcatgacaatcgcgcccggcaatagcaagaggcccgattgcagcgctgtaaagccgactaagttctgcaaataaatcggaagcaggaacattcctgtgtaaagcgcaacggtaataatgatgttaatcacactggaaagtgagaaaatatcatatttaaatacccggaagtcgagcatcggtttttcagagcgcaattgctgaatgacaaacgcggcaatcgcgatgacaccgacaatgacggtagacagcacgatcggatctccccagccgtcgctgcccgcttcactgactccgtaaagcaatgaggcaaatccgacaatggatagaatcgcacccaagctgtcgagtttgattttttgcggttccaccaagttcttaaagaggaagaacgctatgataataacgattgccccgatcggaacaaggccgtagaacataatgcgccatgtgtaatgctcgatgatccagccggaaagagtcggtccgaccgccggagcaaacatcatcgcaagaccgaaaatccccattcctttccccctgctttcaggcgggaagataagcagaatggttgtcatgaccagcggctgcaggataccgccgccgaccgcctgaattaaccggccgatcagcatggttgagaagttaggcgcgattccgcagactaacgttcccgctgtaaaacagaacatggctacgagaaagaggcttctctgtccgaaccgggtaattaagaacgcagataacggaatcaaaacaccgttgaccagcatgtatccggtcgtaagccactgaatcgtcgtcgcactcacaccgaactcggtcattaagtgcggcatcgccacgttaagaagcgtttggttcaagatcgccaggaataacccggccataagcacaataagcaatgttttaggactttttacttgattatctgatttagccacctaagacaacctcccttcatggtttgatgactgatctgtattattcagagatttttacagatgcgttcataccaggaagcaccttgtcagatgggttgctgagtgaaattttaacaggaactttttgcgttacttttgtgtagttgccgcttgagtttgaagaaggcagcatatcaaatgttgaatttgtcgcataaccgatttcttctactgttccgtcaaatgttgtattagggtcgccgtcaacaattacgtctactttgtttcctacttcaatgtctctaatgtctgtttctttaatgtttgcagtgatgtaaaggtgtttcatgtcaatttcctgggcaattgtcgtaccggcttgcaccatttggccgtttttcacttcgtttttcacgattgttccatccatgatggcttttacgtcagcattttgctgtcctttgatttttgcaacaacgtcgtttttgcttacttctttcccctcatcaaggttccagtcagttactttacccgcagcaggagctgtgatagcagccatgtcgccggcaacttttgcttcatcggtttttacatagtgtgtgctttgataatagtagtaagcacctccgcctataattgcaagaacaacaatcaaaccgataatgttggtcagaattaaacgtcctctgttcattttgttttctcctttcgtttcttcctctatcattttgtggaatgatgataaaaatatgtggggatttttttattttccgtttttcactgcacagccgtttgcaagcttcgttaaactttccgcaagcttgcgcaggtactgcagttcaccggtattgagctgccggtataagaccgccgctttttcggcatattgaacagcagctttctttagaagttcttccccctcttcggttaactgaatcataacaacacgccggtcgtcgtgatagtcgctccgaaccattaggcggcgcttatacagaatatcggtcattctcgtgacagacgccggtttcagatcaagcgacaaagccagccttgaaagctgcgtgcttttgctcttatgtattttgaacatcagcagatactgcagcactgtaatatcaaaaggttcaagaactgtctccagaatcattttctgctttttgtaaatcgatctggaagtatcaaacagttgttcaaaactgagcaaagcgagctctgattcaatcaccgtattttcacctcattcccttaataatagttcacaagataaaatattaataaatgaaagaaggtttgtaaagagaaaagtttcattttttaaggattttttttatgccgttttttctctttatttttaatttaaaaaagccgggtgaagaaccgcggccgcacgattcttcactcggctttatatttcatacgatgctttgcttacaccggattcctcatttttaaaaaagcttttcagcgcttgaaatacgtctgatttctgtttcaggatgtagtatttaaatttatcatctttgacatttttataggcggacatgagggtggaatgcctgttatattgattgacctcaccgtaacagaacaggttcgattttttcatgatgtcattgacgagctttacgcaccgggcgttatccgaagtcaggttatctccgtctgaaaaatgaaacggatagatgttgtagcgggcggggtcatatttttcatcaattaattcaagagacttccggtaaacggaggaacagatggtgcccccgctctcgcctttcgagaaaaaatcttcttctgacacaaccttcgcttccgtatggtgggcgataaattcgatatcaaccgtttcatactttgtccgtaaaaatcgtgtcatccaaaaaaagaagctcctcgccatatacttttcccatacgcccatcgaaccgcttgtatccatcatcgctaaaacgacagctttcgattccggcttcgtcacatcattccatgttttgtatttcagatcttccggataaatagggtaaaacgacggcttgcctgtcatggcgtttcgtttataggccgacagcatagtccttttcttatcgatattccctgtcagcccggttttccggatatcattgaactcgatatcggtatggacgatattgtccctttccttttgctgcagattcggcagttctaattcctgaaacagcgcttcttccagatccatcaatgaaacttccgcttcataataatcctcgcctgcctgatcgccggctccctggccttttccggccccctgctttttatctgcgccgtctcttgcgacgacatcgccgacttcgctgtcgccgtcgccttggccgacatgtttatttttatcatagttataacggattttatactcatcaagtgaacggattgggatcttcactacatcttttccattagacataataatgctttcctcagttacgaggtccggaagattgtttttgatcgcttcctgcacttttttctggtggcgctgctggtcatcgaagcctttgcgatggagggaccagttttcctcagaaatcaaaaaatggccgctgtcattttgggacatgaattcccctccttaaccatttgtggtcgtgatacatacgtattccggcttgtgccagattatgaaacaagtctttcgaaaagatttatattcatcatatgcacatatgcacgtttaattgacaaactatttagaaaatgggacaaaataacccgccctattcggacgggtcacgttgcttatcggttcagcaggctgccgacatatttcagcagctcattggcgctcgtcgagttgtagccgtgctcatcaattaaacgggccacgacttcatttacctttttcagctgctgctcatccggcgtttttgttgaggtcgtaattttaacgacatccttcagatcagcaaacagctttttctgaatagcttcacgcagtctttcatgggaattgtaatcaaaccgcttgccttttctcgcataggccgagatgcggattaaaatttcttcgcggaacgcttttttggcgttttccgaaatgccgatctgctcttcgatggatctcatcagcttttcgtcaggattcatttcttcacccgtcagcgggtcgcggagcttatttttattgcagtaggcttccacattatctaaataattgtccatgagagttttcgcggattcttcatatgaatagacgaacgccttctgcacttcttttttagcgatgtcatcgtactctttcctggcggcggaaataaaattcatataccgctctttgtcctcggcggagatggacggatgctggtcgagtccttcttttaaggaacgcagcacgtcaagcgaattgatggattccatattttttctgataattgttgaggaaatgcggttgatgacataacgcgggtcaattccgctcattccttcatcatggaattccttcttcatatcctccagatcaacggaattgtaaccttcaacgctttctccgtcatagagcctcatttttttgacgagatcaatatcagagcggttcggttccttcagtcgggtcaaaatagaaaacatcgcggccacttttaatgtatggggggcgatgtgtacgtcagaaacatcactttcagaaatcattttttcataaatccgttcttcctctgacacctttaaattataaggaacaggcatcacgatgatcctggagtgaagggcttcatttttcttattggcaataaacgagcggtactccgtttcgttcgtatgcgcaacaaccaattcgtcggctgagatgagcgcaaaccgtccggctttgaaattcccttcctgcgtgagtgacagaaggtgccacagaaatttttcatcgcatttcagcatttcctgaaactccatcattccgcggttcgctttatttaattcaccgtcaaaccgataagcgcgcggatctgattctgagccgtattcggcaattgttgaaaaatcaatactccccgtcaagtcggcgatatcctgtgatttcgggtcagacgggctgaaggttccgattccggtacgtttatcctcagagaagaatatacgttcaacctttacatcctcaattctgccgccgtattcttcttcaagccgcatgacattaagcggagaaaggctgccctcaattctgatgccgtattctctgtagaagtcgtcgcgcagatgatggggaatgagatggagaggatcttcatgcatcgggcagcctttaatggcgtaaacagcgccgttgtctgtcaatgagtaggcttcaagcccttttttcagcatggtgacaagagttgactttccgccgctgacgggtcccatcaatagtaaaatccgttttcttacatcgagccgcttggcagccgggtgaaagtattcctccacgagccgttccagagattcctcaaggccgaacagctcccgcgagaaaaagctgtatgtctttttaccgtcatcctcctcgattccgctgtcttttatcatattaaaaacgcgagaatgagcagactgcgcgaccaatggattttcttttatgatctccaaataatcagcgaacgtcccttcccatttgagacgctgctcttcctctctgtacttttcaattttctttaatatatccataagaacctcctctatcatggttaatgcactagaaataaggtactttgttacaatctatgcggtgacgtgataatacatgcttttcgtttcttaaaaataaagacgttacaaggccgtcattgacaagggtccggtgcaccgttcataatgaaagaaatacagtttcatccagactcggacatcaaatggaaaagcaaagaggaggagaaatgatgaaaacgatcattttacttggggtcattctcacttttttagtatccatttttacggcgggttacgacagcaaacctgaaaacaaataacggcaaaagggtgctctttatgaagagcaccctttcctgtacaacataacaatgtttcatatttgaatatgttcttggacagttgatttttcatgagatttgcagcttgtttgatactcgattttttcgattttgcagcccgggccgatttccacatgtttccctctgacgatgtccgcttccgtgtattcgagataaattgcgtctccttcgatcaattcagcagaaagcgtgccggctttccgtttaagaaaaccgggtttccgtctgacggtgatcgatgtgccgccgatttctttcacgcggcttcggtcataacgcaaatggatgtttacgtcccccgcgtttaacaatcccgccacattgatacatcctgttacatgaagcagctccgtctcgcaatcgccgccgacggtgagactgccttttatatgacactgctctcccgcggccccgccgccaatttcagcaagtcctttcagcctcatcgtggcgaaacgcatggagccgccgactttcaatgtgcccatcacatttgctgaacgtgctgataaacctcctgcaacttcatgctctccgaaaattttcagcctgttgatctcggcatctcctagaaaaagtcccgtaccgaatatccggcagcgttcgctttgaagtccttcgccgacagttccttcccctttaatgcttacattttggtaggagccgccggaggcgtgtccggctccgtacatttttaaatgactcaatttttttgtcgtttccatcgcagttcctcctatcgtttcacgactttgttaaccaaagcggaaggatcacatgtaaaatcgccgctgtattccacagtcccaatggtgcagcctgcgccgatccgcacatgatttccgcggactgtcttcgcgttcgtgtccgccaattcaatgatgtcaccttcaatcagttccgctgtcagcaccggggccggcatcagcttaaaacgcgtaagcacgctctttctgctcatcactttcaaatggcggcagccgatctctttcacatggctttctcccgccgtcagctgaatactgacttcatcggcattcagcaggccgccgatcttgcatttgccttccgaacggaacgtctctgtctcgcaatcgccttcaatcgcggctttcccggatatgaaaatatcatcagctttcacaccgccgccgaaagatgaaaatcccgcgacgttcagccgctccgttttgacatcacctttaatgacacccgttccattgatacggatggattcagcttcggcactgccgccaattttccccgaaccgctgatcgtcagcgtttgcgtcttgacatgtccgtctgtttttccgctgccgttaaacaaaaagctcacgcactccacatcacctgacaccgtgccgcttccgttgatctccactgtatgaaaacggcctccttttgaacttcctgaaccgttgatgattaatttatctgttacttccattgatggtcctcctgcatccatttcgtttttaattcttccgatgccgcagcaagcgccacccgttcaaccactttgacagtcggttcaaataaaatatgttccgcgtctgcgatgaagcacgtcgttacgccaagctttcggagcatgacaagctccgtattcgctttcagttcggaagcctcatacgttttcagcacccctgccgccaattttccttcctcaaggctgatattgcctgattgcaaaagtccttcaagcacatataaagacagcagcgcgcgggacgtgaatgtcacaccgtcttcgccataaacttgcagcgcggcttttgaaatcagtcccttttgaagcagttccgcagacgttatattgacatcagtcatttgcggagacagcatttctctcatttcatccaaagacaaattttctttcattttctgtatttttgagatgcgttttaatatttccgctctcggaaaaaatgtttcctggcctgtaaatgttgattttcggataaaccattcttcaggaattaaatttttccgtttccagcggtacagctgcccgtatgaaattgatgtttcttccagcaattcttttttagaaatcagttgttcctccatgaatccagctccttcgacgaatgtattgtaacataacactgttacgttgttaagcctggaattataaaaatgccgtgaacagctgctgtccgtcttttttattcaataaaaaaaacgcccggatgcgggcgttttttctcacgtcaaatctctgtaattttgctggcgcagcgcttcatatacaagaatcgcggccgtgttggacaggtttaatgatctcacatgctcggtcatcggcagacgcaggcagcggtccatattgttttcgatcaattctttcggaagtccgctcgtttctctgccgaatacgaagaaaaagtcttcctccttatttgagtaatcaaatgatgtgtgcggcttttggccgaattttgtaatgaagaaaaactttccgttctcatatgcctcaaataactcttccaatgaatcatgatatacgacgttgacgaactcccaataatcgagtccggcgcgcttcagcattttatcatcggtcgagaatccgagcgggcggatcaaatgaagcgttgtgtctgttgccgcacaagtacgtgcgatatttcccgtattggccgggatttcgggttgatataaaacgacatgtaatgccacgatgttcacctctgttttttattccgcccaccattatatcattaattactcttttgtcgtatcatccgtaatatgaaaaaacgcatatctgatggaaggagtatacgccgttgaatcctcatatgaccaatatctcattctgctgtcatacgtttgggcattgacgagcggcatattgcttttatctttcgcgaccacgatcgccgtatgattaaaacggccgtccccttcaaaatcatagcaaatgatatctccgggcatcagttcttcggctcttgatacttgcaccgcgcgaagccctgccttggattgggccagatacatcttcatcgaatgcgcgaccgtccagctgtagctccacgagcttgccttcatccaccagcctgagcctctgttcggatgcccccgcatcggtgcttttccggcatgtaaacattgggaaataaaattggtgcagttgtcgctgaaatttttataagcggggtttcgtttattccaaaacttctccgcgtactgcacggcagccagacggtcgtattgaaacgcccgcccgaaatcttcccgttcactccgctcatattcaattacgctgtttccgtcagaaaatcccgccggttttttctttacttcccggtctttaatcaaaagctgatcatagagaaatgcagtccgttcctcaatctgctcttctaagtaaaggtgtccgtcatgctccttgcacaaatattcgaaatgaatcgtgtacatgacgcataacgtgccgtcgtcctcaaggctgcttttgacaatgacggcttttgccttcgctttcacgatgtcaactttccgtttttcaaacagctctttttttctcgtcaggacctcaagatcgccgggctgcccattgtgcctcatctcggttccgttgattaaataatgaagccgggcctccgctaaatcttcaataatatgcttcaagcgctccacccaccatactgttttataaagaaaaaaacacttgaactcacgccaagtgctttttctctatacatatgtcaggaccggccggttttagtcttatcagaaaccgataacagctccagtcccttttcaatttcccgtatggcgtcctcatcctgctccttttgaagcgctttttctaattcccccgcataatcaggatcaccgattttcccgatggcccaggcggccgtccccctgatgacggggcgcggatcttggtgcatcaaggccgttaattccggaagagacgaggcatctttaaaatgagccaaagctaaaatcgcattccgctgtatcggcttcttgccgcgccatgatcccgatacatgtccgaatttttctttgaattcgcggttgcttatggtcaaaagcggctttaacagcggctttgcgatttccggatcaggctccatctgcggatgaagatgaaaatctttccccttattaatcggacagaccgtctggcacgtgtcacagccatacagacggtttccgattttcgtgcggaactcatccggcagaaatccctttgtctgggtcaggaacgaaatacagcgctgggcgttaagctgtccgggattgacgagcgcgccggtcggacacgcgtctaaacattttgtgcacgtaccgcacatatcttcaatcggcacatccggttcaaagggcagattggtgatcatttcagccagatagacgtaagagccgtattcaggcgtggtgatcatgcagtttttggcgctgaagccgattcccgcccgttcagccacggccctgtcggacaattcccctgtatccaccattgacttcgtgcggatatcctcatgtttgctttggagaaaattctccagcagatcaagcttttccctcagcacgtcatgataatccttcccccaggaagctctgcaaaaaatgccgcgccgcccgtccctcgtgctcctcggcgcatctttcattttggaaggataagcaagggcgatggcgacgattgatttggctttcgggagaagcaaagacggtgtaacccgtttttcaatatccggttcttcaaacccggataaatagccgagtgattcctgaagaatcagccggtcccgcagactgtcgaacgtatcagccgtcgtaaacccgattttgtcgactccgatgctgttggcgtattcgattaattcctctttcagtttatgaatattcattttttgcacagcctcctttctttgtgatcaggctcccgcacaggtataatagagttttatcatcccgaaatggagtgaacacacttgaacatcagtttagatccacttattgctgaacgggtgccggggatcaaagcggcagccgtcttatatgaacagatcgaaatcgggcctgctccgcaaatgctgaaaggccgcctccgtttatttcaagaatctctttactttgattatgctgacggcggtatagatgagcagccttttgtaaaagagtgggcgcgtataatggaacagctcagtctcgccttttcaggacaaaaaacgccgatggagcttatgctcggcgatatttcccgggaacgattcattgaaagtgtgaattcagcccatgataccatactttttttctccttgaaatattcattgcctatcatggcgtatgatgccgcagaaatagatgaaccgatttcaattacgatcggagaaaaagaaagcgtactgtctttctccggcccggacggcgttttcggcgacttcaccggacatatcaatacacgccctgtcacgcccggcacaaagaaaatgctgcagctgatctttttcccgccttcatttcatgccgacgcggcggatgagctgctatcatccttaacaaaaatgtttgaacaaattcacggaggcacgcataccgtctcttggctttcataaaaagacacgccttcgtgtcttttttcacataaaaaaacgcaatacttcgtttatcagagaaacgaaacactgcgttaataacgtatgtatggagcgggtgatgagaatcgaactcacgacatcagcttggaaggctgaggttttaccactaaactacacccgcatcaaaattatttttttgtcagtaccgatttgatgtttctaatattacatgtttatttttttttcgtcaagggaatgttaaaaaatttgtcgaaaaaaattctttttttgtccacatgttaagttgggtttacattttgttaagagtctcatacaatatgaaaaagaagaaaacttgaggtacgcctgatgatgaaaaataaagtaaaagagctgagagccagattcggctattctcaggaaacgctcggaaaagaagccggagccaccagacagacgattgcagcgattgaaaaaggagattatgtgccttcacttttattggcgcttaacatctgccgggctttctccctgccgatggaggaagttttctggctggaggaggagaaaaaatgagtttgaaaagaaaagcgtgttttcaccttgcactctacggattggcctgctggacgcttatttcctttatggaagcggcgccgcggatcgctcagtttttccaaacggaggggagcggttcatttgagctgaatatcacgccgtttctgctgtttaccgtttgtactgcattatatatctatactgaaaagaaaaaacggaacggcaaaaagcacaggcttgtgcccgatgaatttgaggaacaggatgaaagagaacggatgatgacggctaaagcttgccgttcctcgtatatcgccgtttacttctcattgccggccgcagccgttctgcttttgttttatccgctgattcagccacatcttcccttttttccgattcttttgattttcattctgatgatgattcagcatttggcttatgttttcacttttcataagcacggcaaaaactccggttcatgacagatccggagttttttacgttaccagctcgcttttttcaccccgggaatccggcctttatgggccagctccctgaatgcgattctggacagtttaaattttctcatatatccgcggggccgccccgtcaacgtacagcggttatgaagcctgcccggagcagtatcacgcggcagtttgctcagcgcttcccagtctccttttgcctttaattctcttcggatgtccgcatattgttcaacaagcttctgccgcttgagctctttgatcacttttgatttttttgccatttcagcactcctaacaaatcgtaataattacgttttgtatcatatcatccatatgagcatcgtgcaagctaagcgcttaaaaaggcgggtgaatatccgccttcactgccggcatttccccggaaatgaaaccgcagaaagcgcccgccgtcaattatccgccttgcgacgtcatcagactgtcgctttatttcctcttgcaaaatggtcgtttcccattgcttcacccagtctgcgctcaagctttttagtccgttcattctgaaacggcagaagcggaaacacgagttcagccagataataagcttcttccagatgcgggtagcctgaaaagataaacgtctcaatgccgagtgcctgatactctaaaattcgagcagcgacagtctgcggatcaccgacaagcgccgtgcccgctccgcctctgaccagtccgatgccggcccagagattcgggctgatctcaagcttcgagcggtcaccgttatggagatcggccatccgtttttgtcccgatgaatcagcgcgccgaagcgcagcctgcgctttcgcaatcgtctcttcgtctaagtggctgattaatcgatcagccgcttcccatgcctcttcctcagtctcccggacaatcacgtgaagtctgataccaaaacgcatcgtccttccttccttggcagcctgttttttaacggtttcaatcttttcttttacctgctccggcggctctccccatgttaaatagacatctgtatgtttcgccgcagcttcaattcccgcctgtgatgaaccgccgaaatataatggcggatgcggagactgctttggcggaaacagcagattgctgttttccactttgatatggtccccttcatatgtcaccgtttccccccgcatgagtccgcgccagacggttaaaaattcttcagtcgccttataacgttcatcgtggctgataaacatgccgtctcccgccagttcataaggatctccgcccgctacgacatttacgagcaaacggccgtctgacagccggtccattgtcgacgccattctcgcggcgacagacggctgcatcagtcccggacggaccgccactaaaaatttcaagtcactcgtttcccccgctaaagcggcagccgtcagccacgggtcttcacatgatctccccgtcggcagcagaacccccgtataaccgagtctgtccgccgcctgtgccacttgcttaaaataaagatgatccgccgttctccctcccgtttgcgtccctaaataccggccgtcaccatgcgtcggaataaaccaaagaatctccatatgaatctctccttttttaataggttacccttcataactgttccgccattttaatagtttccgttcgagcattctgaccaatgcatctgtcagcttgccgacagccgcaaaaatgataatgccgacaaacaccttatttgtctgtgaaaattgtctggcatccataatcatataaccgacgccctcgctcgatcccatcagttccgccaccacgagaccgagccacgcaatgcctagagagagcctgatgccgagcaggatattcggcagagatgccggaagaattaatttcgtcatctgctgataccagttaaattccagcacccgcgcgacgtcaaacagcttcgcgtccacactgcggattccgagaaacgtattaatgtacacggggaaaaatgcccctaatgcgatcagcagaatttttgatgtctcatcaaatccgaaccacaaaataaacagaggagtcacggccaagtgcggaaccgttctgagcatttgaagagacggatctagatatgcttccgtccgctttgagaaaccgaccagcagcccgaaaacaagtccgaggcccgcgccaagcagaaatccggcagccgcccggtataagctgatctctaaatgaccccaaagttcacctgaaagaagaagttcctgaaacgtctgcaagatgacgacaggtgaggggagcaccgtggccgagacgatgcccagacttgcgataacctgccatactgcgataaccgcagccgggagtacaacccctttcatccattggtatgaatacttccgggatcttgccagagctttcttttctgattggcttattgcgccggcagccgttgatgcttctgctttcattacttgccaccccccgtttcaagcgcttttttaataaatgaattgtcgacaacgtcttttacatgaattttcttatgaatcgcttttgtttgatattgaaaatcagcggtttcctgctgggctttgacaatatcatcattgatcggttcattgagaggctcagtattgttaagcacgtttctgacgactttcggatcaagatgtttgattttcgcatataaggagacagcttcatctttgtgttccttttgccatgtaactgctttattgaacactttcagaaaacggaccacctcatccgggtgttctttggaaaatcccgttctgactaacgtgaaaccgggagaatataaatctgtgctttctccgttcgccaatatttccgccccgtgctgcagcgtttcaatcgacaaatacggctcccaaatggaccatgcgtcaactgatttgttttcaaaagcggaaaccgcctcatcaggctgaagctggatgatggtgacgtcatcgtcggaaagccccgctttatctaaagctttatagagaaaatcaaagccgctgctgcctttggctacagcgatttttttacctttcaattctttcaggctctgaatcccgctgcccttgtttacgagaatgccgtttgcctttaacccgtcctgagacagcccgatctctttaaaatcaattccagccgcctgaccggaaatgaccggtgaattgccgacctgggaaaaatcaagcttatcggcggcaagaccttcaaattgcggaggaccgctttggaattcgacccattttacttttattccgtcttttttgaaggcctcttcaaaccagcctttttccttggcaatgagaagcgggcttaaactctgctggatgccgatccggatttctttcaccgttttcccgctcccccctgtcctgtctgcactgcatccggctgacatcatgactgctgcggctaaaagaatgatgatttttttcacttcacttcgtcccttctatatcccggacccatccgcaaaccggaggtcttccgttttctcaaactcagaaagcaccttctgccggacggcctgaaaatccgctgaggtccgattgcgcggatgcggaagctgaatcggcatcaggctgtgcagccggccgggctttgccctgaggatcgccagcttatcgcctaaatagacggattcatcaatatcatgcgtgaccagaatcatcgtcgtttttttctcgcgccatatatcaagcagcacatcctgcaaatgtttcctcgtaaaagcgtcaagcgccccgaacggttcatctaaaagcagcacctccggctcgcgcaaaagggctctggcgatggcaacccgctgcgacatgccgccggataattcgcgcggataagcgttctccgctccctgcagcctgacaacctcaatcagatcatccacttttttccgaacggccgggtcgttcatattgagatcggcagcgatgttttgttttaccgtcagccagggaaacagccggtgctcctgaaagataaatccctgccggatgcccggtcccgacacattgcggccgtttattgtgacagagcctttataatcggtatcaagaccggcaatcaattttaaaagcgtgcttttgccgcatccgctcggcccgatgacagtcaaaaattctcccgatgcaattgacagctcaatatcattcagcaccggcgttttccggccttcatgctcaaaagctttttcttgtatgctgatggttacagccatctgtcttcccctctctttctgccgcgtgcgatcgaaaaacaaaaaggcccccatctccgattgcttgcagagatgggagccttcggcggtccgatcggcaacccgtttgtttttaaatttgaatatcatgttaattcaaattattccgactcgtcaactgttttttataaggattaaaatacgccctccggtataaccctgccagagagcgcatcggctgtatcacgtatttacttccttttcttggcgggcgattttcaataatgtccgcgcgttgttgccgaaaatgttctctatatcttcttcccgcatattgatttcccggcaggtcctcacctgctcctgaagatatctgtatacatatcctctcggaaatccgttcgaatccgtcccgaagatgatccgttcagcaccgattaattcagatgtcttccgaaacagaatttccaaatcaagcgggtacggcatccacctcatccactgatttgagccggacgtgtcaatatacacattcgggcagctccagcacagctgcagcagttcctgataatatccggcgccgaaatgcggaatgatgaacgggatatcagcatactctctcgcgacgcgatagatggagagcgggttgatgttgcgatggctgacaatgccccccgctcttcctaaaagcccgaagtgaattaatacaggcagccttttgtcagctagatacgtccacagctttttcagcgacggatcatgaaaatcgatgtctgtcagcggcccgaacagtttatatcctttcagaccgagctcttctaccgctcttttcagctctccatacgcatcctcccgctccaaaggatgatatgcaaatccggtaaatctcgcgggattggcttgaataaacgccgccatccggtcattgctctctgctgttaaaaaattcagcacgtcaatgccatacttatctaattcattctcccatcttgtcatcaaagcgatttcgccgtcatcgccctcaacatcatgcggatcaggaaaatcccaagtcagattcattctatctgaccgctcccggttataatcggaaaatgtcttatcgtttttgccgaaataaaggctgtacggcagatgaccgtgaatatcgacaggtttaaaatgctgccggaaaagcatacaatcgccgcctctcttaccgcctgacaataaaaaaaggcccttatccagtgaagaataagagcctcttgtgtccaagtcagcggtttctattttttctcatcttaaacccattattcccgtcagtcaagtatgctatcaaacccaaacccttttttcgataataaaaataattattttataatcattataaaataatattgactttttaatgataggtgatattatgtttttataaatctaaagaggtgatcacatgagttcaaataaattgacaaccagctggggcgctcctgtcggagataaccaaaactcaatgacggccggcgatcgcggtcctgctttaatacaagacgtccatctgcttgagaaattggcgcactttaacagagaacgcgttcccgagcgtgtcgttcacgcaaaaggcgcgggcgcacacggttattttgaagtcacaaatgacgttacaaaatatacgaaagccgcatttctgtcagaagtcggtaaacgcacgccgctcttcatccgtttctcaaccgttgcgggcgaactgggctctagtgacacagtgcgcgacccgcgcggatttgccgttaagttttatacagaagaaggaaactacgacatcgtcggaaacaatacacccgtgttcttcatccgcgatgccatcaagttccctgactttatccatacacaaaaaagagatccgagaacacatctgaaaaacccgacggccgtttgggatttctggtctctgtcaccggaatccctgcaccaggtcaccattctgatgtcagaccggggcattccggcgactcttcgccatatgcacggattcggaagccatacatttaaatggacaaatgataaaggcgaaggcgtctggatcaaatatcactttaaaacagagcaaggcgtgaaaaaccttgatgttaatacagccgcaaaaatcgcgggcgaaaatcccgattaccatacggaagatttgttcaatgcgattgaaaacggcgatttccccgcatggaaattatatgttcaaatcatgccgttagaagacgcaaacacatatcgctttgatccgtttgacgtcacaaaagtatggtctcaaaaagattatccgctgatcgaagtcggccgcatggttctgaaccgcaatccggaaaattactttgcggaagtagaacaggcgacgttctctcccggcacattagtcccgggcgtcgacgtctcacctgacaaaatgcttcaaggccggttgttcgcataccatgacgcgcatcgctaccgtgtcggcgcgaaccatcaggcgctgccgatcaaccgttcccgcaatgaagtgaaaaactatcagcgtgacggacaaatgcgttttgatgataacggcggccgctccgtctattacgagcctaacagcttcggcggcccgaaagagtcacctgaagataaacaggcggcatatcctgtatcaggtttcgctgacagtgtaagctatcatcatcatgatcattacacacaagccggcgacctgtaccgcctgatgagcgaagaagagcgcgcgcgccttgtcgccaatatcgtcagtgcgatgaaacctgtggaaatagaagaaattaagctgcgccagatcggccacttctacaaagctgatcctgaatacggcagacgcgttgccgaaggactcggactgccatcaccaaaataatatcaaaaaacctgccggtctgcccggcaggttttttctgtttattatcaataaaaccgtttttttctcaattatacgaagtggcatgccgcaaaatgatgaagccctttttctgacagcgccggacttttctcagcacatatcttcttggctgccgggcatctcgttcggaatttacagcctgaaggcggatcagaggggctcggtatatcaccctttaaaattatccgctcccttttcgctccgggatcaggaacaggcacggctgataacagcgctttcgtataagggtgaagcggccgtgaaaagagctcctcctttgacgcgtattccacaatcgtccctaaatacatgatggcgaccttcgtacataagtgctccaccacgcttaaatcatgagaaatgaataaatatgacagcccgtgctgtttttgaaggctgctgaacaaattgatcatctgcgcctggatggagacatctaacgccgccacgggttcatccataatgataaattgcggcttgagcgccatcgctcttgcaatcacgatccgctgccgctgccctccggaaaattcatgcggataacggtcgataaagtttgcggaaagtccgcaggcttcaagaacttccgccgctttatcacgcgcgttccgtttcaccgccaattgatgctcgatcatcgcttcaccgatggcttctccgatccggcgccggggatttaaagaactgaacggatcttgaaagatgagctgcgcttctgatctgaaagttttgagctcgcgccggctcatccgaaacacatcacgcccctgaaaaaacacctctccctctgttttttcatgaagcctcaaaatggtcttgccgattgatgactttccgctgcccgattctcccgctaagccgaacacttctccctttcctatcgtaaaactgacaccgtcaaccgcttttacgggatttttgcgggtctttctcatccccccatgctcctcgtaatattttttcagccccttgacctccagcaacacatcactcatctgctttctcctctctgtaaagccagcacgccgcctgatgccccttcccgaattcagtaaaatgcgggctcgatttccggcatatttccgtgctgtgttcacatcgctccgcaaaataacaagacgatcccgacaggtccgcaagctcggggacttgccccggaatggtgtacaacatctcccttctttgaccgataaccggcttggccgcgagcagccctttcgtatacggatgcttcggatcagaaaacagctttgcaaccggtccttcctccacaatttttcccgcatacatgacaatcacataatcagccatttcagcaaccacgccaaggtcatgagtaatgaataaaatagacgtgcgaaattgctttttcatatcccgcaataaatccaatatctgcgcctgaatggttacgtcaagcgctgtcgtcggctcgtcggcaatgatcagtttcggttcgcagcttagcgcgacagccgtcatgatgcgctgcagcatgccgccgctcagttcatgaggatattggtgcataacctgctcggcatgcgggatctccactaacgtgatcagttcaacggccctccgccatgcttctttcttactcagcaataaatgttcgcgaatcggttcggccagctgctcaccgattgtaaataccggattcaaagatgtcatcggttcctgaaatatcatcccgatttcgctgccgcggattttctgcatgtcttttggtttcaattccaacaggttccgtccggaaaaatgcaccgctccccgttcgattctccccgtctcgggaataagctgcataatggacaatgacgccatgcttttcccgcagccggactcccctacaatacaaaccgtttcctcctcatgtatcgtaaagctgacatcgtccacggcctttaccgccccctcctcagtataaaaagccgtttccaaatgcctcacttctaaaagcggttttttcatttcattttcacctgccgttttaccttaggatcaaaagcgtctcttaaaccgtctccaagcagatgaatcgccacaacggtcagaaaaatggccgttcccggcggaatccacagccacggacggagtgtaaaatccataaaatgattcgccgcttccatcatgtttccccaagaaggtgtcggcggagcaacgccaagcccgagaaaactcagcgccgattcactcagcatcgctcccgccacatgcaaagtcgccgctaccagtaataacggcaatgtattgggaagcaaatgatagaggattttccgtttatcactaagccccagaacttccgcggccatcataaacggctgctccttgagcgacaaaatctgtccgcgtacaagccgcgccagaccgggccatccgatcaggcttaacatcatcataatcaggtacattctgtattcagaaggcactttccactccgacatcaccgcagccaaaatcaaaagcagcggcagtcccgggatggacatgagcatatcagcaatacgcataatgatcatatcagcggctccccgataaaatccggccgcagccccgagtaaagaaccgatgacaagcgacagcaccattgaagcaagccccacggtcagagaaatctgccccgccagcatcagcctcgtcagcacatctctcccgtactggtcagttcccagccaatgatggattcccggctgctgattggcatttgaaatatccgtccgatctgttatgtacggagaaaaagacggcccgataaagcacaataaaaacataaaacataagaaaagaagactgatgaccgtcagcttatgctgcagcaggcggcggtacgtctgcttccaaagagaaggcggcacccctttttgttttttcattccgaacaccccctatttcagcctgacccgcggatcaaccgcggcataagcgatatccgccaagaagttccccgcaatcgttaaacaagacaaaaacaaggtaaacgccatcaaaaccggataatcacgataatgcacagattccagctgaatacgtccgacacccggccacccgaaaatctgttcaataatgatggctccggaaaacagtcccggcagttcaaaagcaagcagggtgatggccggaatgagcgcgtttttcaacgcatgtttccagatgacggtgcgttctttcaatcccttcgctctcgccgttctgatataatcctgtctgatcacgtccagcatgccggagcggaaataccttgtcagcgagccgatgccgagcatagataaaatcacgaccggaagaatcatatgtctggcggcttcaagcacgtacgaaaaacctgtactcgtgcttccggtatcaatcatcccgccgacgggcaatattttcaaatccaccccaaaccacttaataaacagaaggctgataaaaaaagacgggaacgccatggaagcaaaaacaagaaacgtcacgatcccgtcaaaccatgagtatttcctgacagcggatatgacacccgttatcatcgcggctgaccatgtgacaagcaacgccaaaaacgcgacaaaaaacgaattccagacatatttccgaagcagtgacaggacgttctcctgatatttcaaagaaaacccaaaatctccgctgagcacatttccgagccatgtcacatagcgctgccaaatcggctgatccagcccgtaaagcgcttttaactcctgcgctctttcaggagtcaggtttacattggaatcaatatagtcgcccggcagcatggcgaataagaaaaaaataataaaggacgtaccaaataagatcacaagcatttgaatgaatcgttctgcggcataccgtttcacaaaaagcctctcctttccgctgaaagggcaaaatccccaggatgcaccgggtattttgcccaaccgttctattgaattgagacatttgagagacttggactgattccagaataattgtcaggctcaagcccttttatttttccgctgaccgcccttgcgctctgacggtaatgaatcagaatgtaaggcgggttttccccgagctcccggtacagctggtgataaatctcttttcttttgctgatatcaagcgtgccggctcctttctctatcagccggtccgctttcggattggaataccccgttacattattgggatggccggaagccagcttttccaccgtgtcattcggatcaagaatctgcgaggtggaaacggcggcaaggtcatattgtttgtcatttattttcgctacttctgtattaaaatccatcacttccggttttaatgagattccgatgtccgcgtaattttctttcgcgatcgggatgaaatcatcatccgctttagacgtgtaatagctgatttcaagctttttgccgtttttttcacgtacaccgtctttgcccgttttccagcctgcttcatcgagaagctttttggctttttcagggttaaacgcgtaccgattgacatctttgtcatcataagcccacgaaaccggagacaccggcacattcgcgacttctccgtagcgtttaaagcggacatcgacgattttttgacggtcaagtccgtaaataagcgcctgggacactttcttatcttgaaaaggcggacgcttgtgattgacgtacacaagcccgtaatcattcacgacagatacgcttatattggcaaaaccgagactttttaaatgctgaaccgtatcatcatcaggtgagaaagaagcgtaatcaaggtcacccgtttcaaacagctgaagagaagttgacggatcgataattttataaatcagcttttcggttttcggttttccggcataatagtgttcattagcctgatagcgtatttcctgtcccggaaggtattctgtaaattgataaggtcccgctccgagcggtttggcataaagctcttttaaatagtccagtttgccgaattgatatttcttcccgtagtaggcttctgacagcacctgccctcccaaaagaagcagcgacttcgcactgactgtctcagtcgtaatttgaatggttctgtcatcaaggacgcgaatgccatctatcgtctttgcctttccttctttgtaagccttaccgcctttaatataggcagtggtgatatcttcatagcccgcgtatgcaggatcatgcagcagtgttaaagtgaatgcggcatcctttgcggtcagcggtgaaccgtcgctgaaaacgagattttttcttaaacggaacgtgtatgtaagctgatctttggaaattttccagctttccgcaagagccggggcaggcttccccgttttatccagtttgactaacggttcaaaaataggatctgtcgcatttccgtcccagccgttttcgtaaaagtacggcagaaacacgccgcccggcgcggaaatcccagcaacaaaagtgtcagttctggctttcgatttagcgggaatcgccgccggatgagaagctttaaattcctttgtctcgacatgggcgatacgtgtttcttcctttttatcagccgcagatgacggttcttctccggcactccctaacgcgcaccctgataacatgatggataccgacagcgcgagtaccgttgtttttatcctccattttctctccttcatttttatcgaacccccgcatgcttttcatctatctttatataaatctgctccatctgttcctcatttctcataatctcccgtttatttttctctacaagcagttcgaaattcaatgtgtgttttctgtacttttttcgttttttgctctttttgcgcacatgtgataccttttttaacgccacttttcatccctccgcttttcatttcattcaatgactttcacgcaaaaaaggcccttatctgtttaaaagataagagccttcggtgatccgatcagccatcgtttggaaatatgtaatgattatgttaattcatacaatccctacctgtcaactacaatttaaaatatcgtttccttccgggggttttcctcatacactctctcatttttccgcatatgctagaaaacatagcagagtacaagtgaaagtgagtgagaatgtggaaaagacaacattgaccggtcgcatcgtcaaaaaagatgacccagaatataatgctgcaagaaccaatatcaatttaagcctgcaaagatatccagacatcattgtgttttgtcaaaataaacatgacgccctcaatgcgctgagatgggcgcgtgagaacaatgtgcctttccgtatcagaggcggaagacacagctacgaaaatttttccctgttaaataacggactagtcattgatctcagtgaaatgaagaaaataagagtaaatgaggatacgcggctggtctcgattgaagcgggagccgaattgggggaagtctaccggacactctggcggtacggcttgacccttcctgcggggaccattgcgaatgtgggaatcacggggctgacgctcgggggaggaatcggatatttaacaaggacagccggacttacttgcgatcgtctcctccagctcgaaatgatcatagcggacgaaaaagcgggtgctgacttgatcacagtcaaccgttcaaagcactctgatctattttgggcgtctcagggaggagggggaggcaacttcggcattgtcacatccatgatgtttaaagccgtgccgatctcgtgcgtgtctgttttttctgtcacttggggctgggatgattttgaggaagtatttaacacgtggcagcgatgggctccatttacagacaaccggcttacctcatcaattcagttttggcctaaggaagtaaaccgcatagaggctctcggtcaatttaccgggacaaaggatgagctgaaagaactgctggctccgttaatgaaagcgggaaaaccgacaagcggcatggtcaagacagtgccatttattaaagcggcagccttttttaacagcccgggaggcaatcagccgcaaaagatgaagcggtcaggatcctttattgaaaaaccattatctacacgcgcgatttccactttaaagcgctatttagagcacgctccgaacgaaaacgccagtgtctggcagcaatctctcggcggggcggccggacggatcgctccggaccaaacggcattctactatcgcaacgcaatcattgcccaagaatatattacaacttggacatctgctgaagaagaaagacaaaatgtccgctggatcgaaggactgagaacgtctctatcaagagaaacgatgggagattacgtgaattggcctgatagagaaatcagaaactggctgcaaacatattacggagaaaatgttcaccgcctccgtcaagtcaaaacgaaatacgatccggaaaatatattccgatttgagcagagcattccgccgcttcgccgttcaccgtttttctaaaaaagatgaagatgggcaaactccatcttcatcttttcttttattgatataagcggcttcccttctctgcaaactcttttgctttttctttcagcccttcattgacggcctcgtcttcagtaagtccgttttccttcgcataatcacgaatatcctgagaaattctcatgctgcagaacttcggaccgcacatcgaacagaagtgagccgtttttgcgccttcagccggcagcgtttcatcatgatattcgattgctctttcaggatcaagcgacaaatgaaattgatcacgccaccggaattcaaaccgcgccttagacagagcatcgtcacggatctgtgcacccggatgccctttagcaaggtctgcggcatgtgccgcgattttgtacgtaatgacgccttctcttacatcatcacgattcggcagccccaaatgctccttcggcgtgacatagcaaagcatcgccgtcccataccagccgatcatcgccgcgccgattgctgaagtaatgtggtcataacccggagcgatatccgtcgttaatggcccgagcgtgtaaaaaggcgcctctttacaaatttccagctgcttgtccatgttttccttaattttatgcatcggcacatgacccggtccttcaatcatcacttgcacatcgtgcttccacgcaatctccgtcaattctccgagagtctccaattccgcaaactgcgcttcatcattggcatccgcaatcgaaccggggcgaagcccgtcaccaagagaaaaagcgatatcataggtcttcatgatttcacaaatttcttcaaaatgcgtgtacagaaagctttcctgatgatgagccaggcaccattgcgccataatcgccccgccgcgggaaacgattcccgtcgtgcgtttggccgttaacgggacgtaacgaagcagtacgccggcatggatggtgaaataatccacgccctgctccgcctgctcaatcaatgtgtcacgataaatgtcccacgttaaatcctcggcaatgccattcactttttcaagcgcctgataaatcggcaccgtccccacaggcacggggcagttgcggataatccattcacgcgtcgtatgaatgtcttttcccgtggataagtccatcatcgtatcggcgccccagcgaatcgcccacgtcattttttcgacttcttcttcgatagaagatgtaacagccgagttgccgatatttgcattgattttcacatgaaaattccggccgataatcatcggctcgctttccgggtggttgacgttagaaggaataatcgcccgtccgctcgccacctcttccctgacaaattcgggagacacatgctcgcgaattgcgataaactccatttccggcgtaatgatgccttttctcgcataatgcaattgtgttacatttttccccggcttggcccgaagcggtttccgctgtaggccggggtattcggcggcacggccctcttttttataaccgttgtcttcaggcttcacggtccggccgttatattcctctacatctccgcgcccggtaatccactttgtgcggagcgcccccagcccttcatgaatatcaatttgtacatccgggtctgtatacggcccgctcgtatcataaacacggaccggcgcattctcctcttccccgaatgcccccgtagtcgcactcaggctgatttcccgcatcggcactcgtatatcgggcgaagaaccttctgcataaacctttttactgccggaaaaactcgacataatggaaatgttcgcttgctgtactgattgattttgcatacaaatctctcctttatcatttgaataacagaaccaagctcagcaccagcacaaaaaaaccgggttcaaagaagaacccggttttgcagtcagaaagaaactattattgttttcttcaacaataataaaacctttacttccccacgctggtacgaaccagatcaggtccaaagggttaagaagccgccgcttctctctcagcccgctcagacgggcacccccagtaactattaatttcgctctcatcgtaacataagttgtgtacaaaaaaaagcatattatcaaaattcagataacgggacagtcataagctctgcttcccgaacgccttcttcggtattaaaaacccgataaccctttgcggtttcccgggaagagacagcccggatcagctgaccgtctttataatgaagcgcagcgccgtcatcagcggcatagccctccctgagtttcttttctgaaatcagacggtgatacaccggccggcgccccgcttctccgtcatagtgcggacaaaagctgcccggcaaaaatcctaaagctcttaactctctcaaatctccagctgaatccgtcaatccttcttcataccagcaaatcgccccggcgctgagacccgccaacatgatgccgttttcccaagcctcacgaagaatacggtcaagcccccattctttccataagacaagcatattgcgcgtatttccgccgccgacatatataatgtctttcttcatgagaaaggatctgagatcagaacccggcggtttaaacagcgtcaagtgatccggctcacaccgcagcttttgaaaggcctgataaaacctgccgatataattttccgaatctccgcttgccgtcggcaaaaaacaaactttcggctttgaccgcgccgactgctctaaaatatactgatccagcacaagatgatccggctccatggaaaagccaccgccgcccattgcaataatctgcttcacgtcatcacctctttttttctctagtataacagctcataaaaaggcgttatcccattttcggataacgccttcaaaaagtatttgttatctgaaaaatgaaaacgcaccgtataacacaacggagatccctgcggcgataagcgccggaacaagcttcgaacgggcatacttcacaacatcgatccccaacaccgtacaggttgtcaccgtattatcactgagaggagaagcaaacgctccaaatgttccgctcgcaaacacagccccgatcgctaataataagctggtatgtgactgaaccgccagcgttacgccgagcggcattaatagcccccaagtcccccaggatgacccgataaaataggatataacagcccccagtataaaaagagacggcgcaataaacatatgagggatccatgacgttaaatgagaagtaacatatttcgagaatcccagatcttcagatactgctgttacggcccaaatcagcgataacataataataacgttgaccaattcgtttccgcccttaataaaatgggtaacaagctcgcctgcatgaaaacgctgaaacataaaaagagcaaatgctgcaataaccgctgccaataatgcggttaacatgacgccaagcatatcacttttgataaaagcattcaaaaacccttgtgcttttgaatgaccgtcccaccagctgagaaagagtgttaatagcaaaaacagcccgatcggaatgattaaattccaaggccgaatcggtgtttccttaatataagcacggtgcgccgaatccagctcctcctgctggtcagcatgctcatcactttcgaacattcccgtatgtccaccgtgaatatctgagatcgtccctgtttccatgttgaatgaacctgagccttttgaaagcaacacaccgctgttccgcggaatcggttccgtatttttgttatgtttgcgagcagaagtttgtccgctcttttctgttttttctaagctttcgtccgctttttgtttcttaaaaaagcagtaataaattccgactactataatcacaatggagaaaaaattgaaaggaatacttttacatacaccgtataagccggctgatctattcctgacgttttaagggcctgtccgataatggaaaccatgtagccgacaaatgccgttgctatcggaatcaaggcaatgacagggtttgccataaactcaatggcatacgcaattttctgtttcgacaggtccagacgcttgcttaacgctttcatgatcggtgcaattgtgacgatgcgaaagtccggttcactaaacgtgccaaatgtcgacagccatgcaagcagcatcgcaccttttttggttttaacttttttactgatcaaatggacgaatccttttatcccgccggtcagctttataatccctacaaggccggcaaatgaatatagaaacacaatgattctaatattattggtgacgacaatattgctgattacatattgaaccatatgttcaatcccgccaagcaagctgggatgcaaaagatagcttccgaccagcaaaccgataaacagaccggactgcacttgctttgtaatgattgaaatgggaatgaccagaataaatgggataagacaagcccaagtcccttccactaaaaacacctctttcaaagaacttcttgttagtatctttgaaaaaagcggatttatacaatcagcaggtatcatgttttcacaagccttggaggatattttcatacaacaaaaaaggcttctacatattgtagaagcctttgtataccggtggccggggtcgaaccggcactccagaaggaacacgattttgagtcgtgcgcgtctgccaattccgccacaccggcatgtaatgcgtcgtgttcaaccgacgtatataaatataacatgtattttataaaccgtcaacggttttagcaaagttttttaaatggtaatgcagtatatccgatacaaacaagaaacttatattgatagtcattacgtttttattatataaaaagagtgatctgcaatatgcaaatcactctcatatatgttttataatgtgaaaattgatgaccaatttaacatagttcgttcaaagttaaattggtgccgagggccggacttgaaccggcacggtagtcacctaccgcaggattttaagtcctgtgtgtctgccaattccaccaccccggcaatagaaaggcgacacccggattcgaaccggggataaaggttttgcagacctctgccttaccacttggctatgccgccgtaatttggagcggaagacgggattcgaacccgcgacccccaccttggcaaggtgatgttctaccactgaactacttccgcaacatgtaaaagaacttaatacatcttatgctgttgttttttaaaaaatgcaactgggctagctggattcgaaccaacgcatgacggagtcaaagtccgttgccttaccgcttggctatagcccaatgataaaatggggcgattgatgggaatcgaacccacgagtgccagagccacaatctggtgcgttaaccacttcgccacaaccgccataatctgaagatgaataaataatatagtggcaggggcagtaggaatcgaacccacaccggaggttttggagacctctgttctaccgttaaactatgcccctatttataaaatggtggaggggggcagattcgaactgccgaaccctgagggagcggatttacagtccgccgcgtttagccacttcgctacccctccatcatttagagtgccggccagaggacttgaacccccaacctactgattacaagtcagttgctctaccaattgagctagaccggcaaatggtggctcgggacggaatcgaaccgccgacacacggattttcagtccgttgctctaccaactgagctaccgagccattttataaatggcggtccggacgggactcgaacccgcgacctcctgcgtgacaggcaggcattctaaccaactgaactaccggaccatttaatttttggttgcgggggcaggatttgaacctgcgaccttcgggttatgagcccgacgagctaccgaactgctccaccccgcgataataatggtggaggatgacgggctcgaaccgccgaccctctgcttgtaaggcagatgctctcccagctgagctaatcctccatcatataagtgacccgtacgggattcgaacccgtgttaccgccgtgaaagggcggtgtcttaaccgcttgaccaacgggccctggtattttttcgtttgttatgtattaataattagtggcggagagcaagggattcgaacccttgagacggggttaccgcctacacgatttccaatcgtgctccttcggccactcggacagctctccataaatggctccgcaggtaggattcgaacctacgaccgatcggttaacagccgatagctctaccactgagctactgcggaatgaagtctgcctggcgatgtcctactctcacagggggaaacccccgactaccatcggcgctgaagagcttaacttccgtgttcggcatgggaacgggtgtgacctcttcgccatcatcaccagacgttttagtgacatgtattattatactatatatttcagaaaaagcaagagtttttttgaaaaaaattctctcaaaactagataacagtaagcatacattcaaattggttaagtcctcgatcgattagtatctgtcagctccatgtgtcgccacacttccacctcagacctatcaacctgatcatctttcagggatcttacttccttgcggaatgggaaatctcatcttgaggggggcttcatgcttagatgctttcagcacttatcccgtccgcacatagctacccagcgatgcccttggcagaacaactggtacaccagcggtgcgtccatcccggtcctctcgtactaaggacagctcctctcaaatttcctgcgcccgcgacggatagggaccgaactgtctcacgacgttctgaacccagctcgcgtaccgctttaatgggcgaacagcccaacccttgggaccgactacagccccaggatgcgatgagccgacatcgaggtgccaaacctccccgtcgatgtggactcttgggggagataagcctgttatccccggggtagcttttatccgttgagcgatggcccttccatgcggaaccaccggatcactaagcccgactttcgtccctgctcgacttgtaggtctcgcagtcaagctcccttgtgcctttacactctgcgaatgatttccaaccattctgagggaacctttgggcgcctccgttaccttttaggaggcgaccgccccagtcaaactgcccacctgacactgtctccccgcccgataagggcggcgggttagaaggtcaatacagccagggtagtatcccaccgatgcctccaccgaagctggcgctccgtttccaaggctcctacctatcc

SEQ ID NO: 3 - DNA, 1074849 bp, Bacillus subtilis
gtggtagccgaagccaccttttatgtctgaaccatgcggttcaaacaaccatccggtattagccccggtttcccggagttatcccagtcttacaggcaggttacccacgtgttactcacccgtccgccgctaacatcagggagcaagctcccatctgtccgctcgacttgcatgtattaggcacgccgccagcgttcgtcctgagccaggatcaaactctccgataaagtgtttgactgactacgcacatcgctgtgcgatttatttaaaactttgaattaacaggtacgttttgtcttgtttagttttcaaagatcattaccgcttgttgaagcagctttattatcttaccactcagcttcttttatgtcaacaacttttttcaagttgtttccgaagcttttcgttgttgtctgctgttcatcagcgacgtttaataatataacacccttttgaaaatatgacaatagtttttttaaaaaaatcattaattattttctttcatacttatttcagtttctcttctatagaaagataagctgtcttgtggtttggcatattttcttgtatagtaagattgaactaaatacttgatgaccacaaggggagcattaaagctgagagtgaacgttttgttctgaccctttgaacctgttagttaacgctggcgtagggatgtggcaaagccaaatgatttgcagtttatgcaagcagcgcgcggaccttttcccatccttccccgcgctgcttttttgtttatccttgttacggttgtctgaccagggggaaaactatgaatcattcaacacagcttgtgcgcttaattgaaatagcgattatgaccggggcggctgtcattctggacattgtctcaggtatgtttctccggatgccccaaggcggttcggtctctattatgatgattccgatttttttgatttcattccgctggggagtgaaagccgggcttacgacaggctttttgacagggattgtccagatcgccatcggcaatttgtttttgcagcacccggtgcagctatttcttgattacatcgcggcatttgcagttctcggtttcagcggcttgtttgcttccggtgtacgagaatcggcattgaataaaaaaagaggcgctttaacgatgtatgttataggcggtgttttcatcggcagtgtgctgcgctatgcggcacatgtggtctccggagctgtctttttcggaagctatgctccgaaaggcacgccggtatggatttattcgtccgtctacaacgcgacttatatgattccttcttttatcctttcggccattgtccttatcttattattcatgactgcgccgcggcttcttgaagctaagcggacaaactgaaacagcaggcggtttacgcctgctgtttttttattcctggctgtgctgttcgtttgaatcactcagttcttttgtaagttcatttatactttgttttatgtttcctttgcctgaaaaattctcaataagctcttttacattgattccggaagatgcttttaagctttcctgaagaccggccattaaattggttgcgtagcctgtgactttattggccccgccgttttcaccgcttcctcccgtatcaacgacggttattttatcaatgttggaaagaggcgctgagacttgcttcgcatattcaggcagcattttcacaatcatatcaaggattgcagcctgcccgtatttttcgaatgcttcggcgattttttctttagcttccgcttctgcgagacctttcaggcggatgacttccgcttcggtttctcctctcgccttttcagcctccgctttagcaagaccgtcaattctcacgcgttccgcttccgccttggccatcgcttcgatgctgtactgctcggcatccgcttctgcgagctgcttcgcttttgcggccgcggccgcttgttccaccgagtaacggtcagcatcggcttttttcttcacttcagagtcatattggcgctcacggcgcagaatttctttttcttccaattcaatctgcttttgcctctcaataattttaatttgcatttcctgctctgtcacctgctggcgggcttttgctgtttcaagatcatatgcctggtcggcattggcttttgctgtatcctgctctcttctgtattccgccattttcagctgattgattttttccgcttcagctatttccgtcgcccgctccagctctgatttttttgcgtctttatcagcggccgcgcgtttaatcctcgtctctttatccgcttctgccgtggcaatgtccgcatcccgcttgacttgggcgattctcggcttacctaatgattcaagatagccgtttttatcgcggacgtctttaatcgtaaaagaaacgatcacgagccccattttagcaagatcctgagacgcgacccgctggacttcctgagaaaacttttccctgtttttataaatctcttcaacggtcatggagccgaggatggagcgcagatggccttccagcacctcccgcgcctcctgctcacggtcttccttggatttccccaaaaattgttcagctgctgtggcgatttcaccgatggagcctccgattttaataatggcggttccgtcggccattaccggcacgccttgctctgtatagacttcaggtgtagagacatcaagtttgcttgacagtaaactgagaggttctgcctgctggaataccgggagcacgaacgttcccccgccccggacgattttcagacgatttccgccttcatcaatgtggacgttcttatttcccaaataacttccggtcacgataagggcttcgtccggccccgccgtccggtacttcgtaataaatacagcaataagtgcgatgagtaaaaagaatacgattccgataacgatgataatcggcatagtcataacagttcccccttagatatcagattggttcatgcggcgtcacaaaaagcactccgtctttcacgtcaatcactaatacggcagttccgtacttgatctgttcttgatcaaagctgacggctgatttagaaatggcgccccctattccctctatgatcacttctccatagccgtctttcgggacggaagtaatgaccctgccgactctgccctttaaatccgtctctcgataagcgagcgattcttccgctgatgaaagcgggacaaggacgaagaagtgaagcaggctgaccaaaagaaccgaaagaacaaatgaaagcaacgcaatgacagaacttgatagcggagcggcgatttcgccgatataacctgaggctgaaaagattgttaaaaaagacagaatcaatgcagggtttaaaaatgaaacaggaatggcttccgagaggccgtgaaacacatcttgaaaaaacagaatcaaaagcgtgagacttcccgaaataatcaatgtgtaaagatagaccgtttcaagcggcagatgaaatatgtccatcttctatcctcctttcagccgatgtgtcggagtgttactttatatacggatgtaaaggtaaatggtttcaattttctgataagggaggctgattacatgattatccaatccggatatgatatgtttactctaaaggaggagataggatgagcatttttaatgaagccagacagcagatctgggaagaactgaaaggactctctgatgaggaattcaaccgaaagcccgcggctgatgaatggagcgtgcgggaagtccttgaccatttaaagaaaattgacgaaacagcgcagacccttttatcaaagcaggcaaaagacgcaccgttaaaagaaatagaagaaaaaccgatggagtttatagaggacagaacagataaacggccggcgccctcacacctcgaacctgagcaaaaccgattatcagtcattgaagcaaaacaggaattagatacggcaagacagcagctgaccgcagttatttcatcattaaacgaggaagactttgaacgtgtgcttccccatcctgtttttcaagaactgacgatccgccagtggattgattttatcggccatcatgaaaagcgtcacattaatcaaataaaagaaatcaaacaaaaaatcgaaaaggtctgagtcagaccttctcgatttttttcttggcgcgtttcggttcataagaatggatggtgaccgcatcgcccgtgcatatgtcacccgggcgttcaacaatacagacaattcctcttctgcccatcgcgtgcctcacaaacgccgcggcgagttttggctgatccggataaaaggattgaatgacttctcccggctgaatgcacggatcattttctccctcacacaacagagacgcaccgcttggaaatatcattctgcttccttctttaagcggcgtcagtgcagaaaaaccgctgattgcgatattagcgccgagccattcgggaaagatatgagaaatccccatcttctccgcaatgtcatcacattcctccatagacacgattgaaatctgtctccggttaaaaatttctgttcctctttcatacatcggctcgcgcgcgccggccttttttgtcagtccgaaatgcaggtcaccgggaaacccgccgtattccgcacgaagcttgtccatctttttggtaacaaattgttcggtatccgctatatatacgccttccgtctttgctgttatgcgtttccacattagccgccaccgcctttttcttgacattatccttaaaaaaccccgctctgtaaaggagcggggttcatttattataccgttttcggcgttaagtcaaagcagcgtttgtaaatccagttgtatgctttctcattcaaatctcttggatttccgaaagtttgcggatctttcatggcttcttttgataaacgttcaatcatgtccggagacacaccttgttcttctaaactcggcacctctaaatcttttacaagatcatacatccagttgacggacgcttttgccgcttcttcggttgtcatgttgcttgtatcgattccgaatgctttggcgatgcgggcgaatttttccggatagcctttccagttgtattccattaccggccccatcatagctgcgacgcattgtccgtgagcgacagggatgatgccgccgagcgtctggctcatcgcatgcgccgcgcctgctgattcactgccgtatgaaaggccggcaagcatcgccgcctgcgccatgccgtatcttgcttccaaatcctctccgtccgcaaacgcgcgcttaatataatgcgccgcatattcaatggccattaaagcgacggcatcagtgatcggctgcgcgaatttcatcgtatagcactcgatggcgtgcgcaagtgcgtcaatacctgtcatggccgtcacatgcggaggcatggacgtgtgcagctcagggtcaatgaccgttaaatgcgcggcgataagcggtccgcccgtattgaatttaaattctctttcctcatctgtaatgaccgcccattgtgtgacctctgaacctgttcccgcagtcgtcgggatcgttgtcagcggaggaatacggttttccagcggctttttgccttccgcggcttcataatcaagcacgcttccttcgtgtgtcgcttctaccccgatcgctttcgctgtatccatggagcttccgccgccgacagccacaaggccgttgcagttttcttttttatacagttctgatccttcgtttacaagacgtacaggcgggttcggctccactttgttaaacaggacgacttcgatgcccgcttcctgtaaagattcaatgaccgggtttgccactcccgcgttataaattcccgggtctgttacgagcagcgcttttgtgacgccaagcgctctgacttcacttcccgcttgctgaatcgcaccgattccgtgtttaatgactgtcgggatttcgaatgtatggaatttatgcatgctttctactttcatatttaatgtcatattgtatctcctcctcgttatgcttgaaaccagttcacagccgctggtttcgtgttgcggtaaatatgtttgatttccgtgtattcttccagaccgattttgccgagttcgcggccgaagcccgattgtttgtacccgccccatggcgcttgcgcgaaatacgggtggaaatcattgatccataccgttcccatccgcagtttggcggctacgcgttcgcatttttcaatatcctttgaccataccgctccggccagcccgtaaatggtatcgttggcaagtctgatcacttcttcttcagatgaaaatgactcaactgttaaaacggggccgaaaatctcctcttggactatccgcatatcagacttgcagtttgagaaaatagtaggttcatagaagaaaccgttttgaagggcgggatcatcaggacgtttgccgcctgtttccagttttgccccttcttcgataccgatttctacgtatttttcgactttggcccgatgctcggcggaaatcagcggaccgctttccgtatcttcatgaaaaccatttcctaatttgatgcgtttcgtgcgcttgatcagctcggctaaaaattcatcatgaatggcttcgtccaccaaaagacgtgaccctgccgaacaaacttggccggcatggaaaaacacggcgttcagcgcttgatctgcagctgtttcgagatctgcatctcgaaatacgatattcggatttttgccgccaagctccagggcaatctttttcacattgccgcttgccgcctgcatgatttttttgcctgtttcaattccgcccgtaaaagagaccaaatcgacgtcgaggtttctcgccagctcatcgccgacagaggcgcccggccccagcacaagattggcgacccctttcggaataccggcttcttctattaattgaaagactttaatggttgtcagcggagtaatctcgctcggctttaaaacgatcgtgtttccggccgcaagagcgggagcgattttccagctcgcctgaaggagcggatagttccacggcgtaatttgtccgcatacgccaattggctctctgacgattttacttacggaatcgggaatcggagatgaaatgacctcgcctccgtctttatccgccaaaccggcataatattgaaatacatttgcgatatcatccatatcggctttactttcttcaatcgtttttcctgtatcgagcgattccagctcagctaattcgttcagatcgcgtctgattaattccgcaattttcagaacaaattgtccgcgctcgagcccggaaagcaccggccactccccttcatcaaatgcttttctggctgcggcgatggctttcaccgcatcgttccggtctccttcgcataccgttgcaatttcttcttgattaaatggattaatgatacggcgggtctgttttttttctgcactgatccattcgccgccgatataaagcgttttgctcataagagtcctccttaccgaaaagtaagtttgttaaataaaaatttaatgtttttaacaatattaatttaacacatgtttttttgcctgtcaaaacccggtcagtccgtttagattttgacattttgtcatgattcgttaagattaagaacataaagaaatgacttaacaaatttaaacttcaagaggaaaagagggacagtatggatgagaatccagaaatcgcagctatagaacaagccagggatcttgtcattgattccattgcagagacgatggatctttacggaatcacacggagtgtcgggattttatacggaacaatgtatatgagggatgaaatgacgcttgacgaaatgcgtgaggaactgcagatgagcaaaccgagtatgagcacaggcgtcaaaaagctgcaggatttaaatgtggtcaaaaaaacctttcaccgcggcacacggaagcatacgtttgtagcggaaaaagatttctttacgtttttcacgaatttcttcccgccgaaatgggatcgtgaagttcaggtgaatttgtccgccatcgaacaggctcaggcggatttgcagtccgttttgctggccgaggaaggcaacgcggaattacaggaagaagcgcggcagttatatgatcagcttgaaagttcgaaagcttactatcattggctgaagcggctcgctgactcggttcagagcggggaaatttttaaatttattccgatagaaacggacgaaaaaaacgcctgaatcaaaatcaggcgttttttgtcgtgatttgattatttttgagaaaatataggaacataaccccatttacttccattaaaattgatggtaaatttttataggtatggtcgttcttttttaagaacaatcaacaaattttttttagggggatttatgaaaatgaaacagaaatttttctcaactgtcatggcaagtttattcggcctggttttgcttctttctctgccgacagcgtcattcgccgctgagtcaggctcaaccgttcacgagccggaaatgtccacgaaagcgactgctaccttatttgcaaaatatacaggtgccagccagcaggaatggtcattttctgatatcgaattgacgtaccgtccgaacacgatcctgagcttaggcattatggaatttacccttcctagcggatttgcggctacaacaaaagatacagtcaacggacacgctttgcgtgaaagacagattctgaataacggcaaaacagtcagacttccgttaaacattgatttgctcggcgcagcggaatttaaactttctcttaataataaaacattgcctgctgcaggtacatataagttccgtgcagaaaataaatcattaagcatcggctctaaattctatgctgaggacacaattgttgttcaaaaacgcagcacaccgccgacacagccttgcaactgcaaataattgcgaaaaacggaccggcacaagcccatcgcttgtcagccggtctttttttgtgctgttttctttcttccggccctcgcattgacaaacccttgaaacaggagtacattcttgtttgttgtatttggagtgacgaaaacagtttcttaaggagttatgaggattgggaaaaatcaaaaataaacaatttgccgtcatcggactcggccgtttcggcggaagcatctgtaaagagctttttaaaatggggcatgaggtgcttgcggtcgatatcagcgaagagcgggtcaacgcatactcctcttatgccacgcatgctgtgcgggcaaattcaacggaagaaagcgagcttcagtcgctcggcatcagaaattttgaatatgtcatcgtagcaatcggcgccaacattcaggcaagcacgctgacgacgctgttattgaaggagctgaacatccctaatatttgggtgaaagcgcaaaactattatcatcacaaagtgcttgaaaagatcggtgctgatcgtattatccatcccgaaaaggatatgggcgtgcggattgcgcaaagcctttcggatgaaaacgtcttaaattacattgatttgtcagatgaatacagcatcgtggagctttcagccacgagaaagctgcatttaaaatccattcttgatctcggcgtccgggccagattcggctgcagcattctcgccgtgaaacataatggagacattcagctgtccccttctccggagactgtcattcatgaatgtgactgccttgtgctgatgggacataaacgtgatattaaaaggtttgaaactgaaggaatgtaaaaaagccggcgggctgccggctttttttgatgcttatgtttcttcacttaactggacggcggtttggtcaacccagccgatcagctcatctttcacttgaatttggtaccagacggattctccgttttgtttttcagatacgactttaatatgctggccggtaaacttttgcgccgatgccagtttaatagaatgccgctctttcgacggcttggaccacacgtcttcaatggcgtggtctttgatggcgcctttcatatcaactgctttaagagaggcattgattttgtcatattcattcagattataggtttctatgacatctttaattttttcagcatagccggggtctgtggcgtagccggatttttgaagggcagccgccgctgttttataattgtccgcttcaatgacaggcttatacttctttttattccaagacgttccgttgacaaataatttggcatggtcatccattgattcaaaaaacgtgctgtatttacggaattttgcccgaatcgtttttctttttcctttttcaaattcatccgttttcatcgtgacgtgttttcctttataatcaccttttacaccgaacaggttgcgcgctttccctgcaagctcactgttcccccagtccgattcgagaatggcctgtgcgagggtgatgctcggaaggacatgatatttctcatataaaatttgagcatgcccggaaaggctgtcaataaagacctgctgctcgtccacctcttcaggcggtttttcttccgtcactatgaatttcgaaaacaccattgataccagaaataacccgaatataagagatacagcaaaaaggcacccaagcacccttttggtctttgctttctttttcatatcaaccttcctttaattccggaatcactagatttataattttactggtcattgatgaaaatttcaataaaatagggaaaaagacggagaaagaacacattgtgcaaacaaaaaagactcctctttgaggagtcttttttgttatgccatgctcagctgagggccgaacaattcatattgaacggaatcagagtcaaacccgagagcaagaatcatatctttcatttgcgtcataaactgcgctgatccgcacaagtaaaattcagcatcttgattcagatgaagctgctccaagaaggtttgatcaatcctgccgctgtaaaaaggcttgtctcctgagcggtcttgttctgccggttcactgtatacataaatgacgttaatattcggatgattctccgcagcttgttcagcctctttgcggaacgcggcgtactctccgtttttcgcggcatgaataaaagtaacggaacgctccggctgtttttcggcggctgttttcagcatgctcatcatcggcgtgattccggaaccggcactgataagaacaaccggtttttcggcagaagacagcttgaaatccccggcgggtgcgctgacttcaagtttatctccctcttgaacttcattgtggagatgagaagaaaccgctccgtcctttttcacagaaatccgatatgcccctttttgagaagcatcagacaggctgtactggcgaatgtgcgtataaggagaatccgcaatccgcactttaatgctgatatattgtcccgcttcaaatccaggaagcgaagagccgtcactcggtttgatataaaatgatgtgatgtctttgctttctttcgttttctgtataaccgtaaattctttatacccctgccatccggcttcattgtacatgtctttttcaatgccgatgaaagcctccgcaataacaccgtaagctttttcccatgcctgcataatctcaggagttgcggcatcctgcagcacatccttaattgccagaagcagatactttccgacaatcggataatgttccggttttacaccgatgcttgtgtgtttatggccgatctgtctgaccgccggaatgatttgttctaattgatcaatattcgccgcagccgcaatgactgcatttgccaatgctgcgcgctgagtctgtttcttttggttcgtttggttaaacatatttaacagttcgggatgatcttgaaacatcaggttataaaagcgtccggtgatgttttctccatgtgtttgcaatacgggtactgtgcttttgatgatgtctattgttctctcatccagcatgttaatcctcaacccttctaaagatgtattttcaatatatctttatagtaagagatatttcgaataaaagatatattgaaaatgaatctttaaaaaagtcgtcacaatattgtgttggatttggaatttatggatttcacctcctttttttatcacccggtgaaacagggacacatatatttggaaatatacgtttaaagatgaaagcgggggagtgcatggtttccgatatcgattacacgtctccgaatacacagttcacttatgatgtgaatgagagccgtttttttacgaaagatgctcggaactttatcaatgtattggggattaaacagttaaacacgcttgaaaatatttcattattagatatctttctgagcaaaacaaatgtgattgaaccgcatacccatcaaaacgccgctgaattggtgtactgtatttcgggttccgcggtggtgtcgatgctgaatccgttcacccagaaaatacggaattatccgatctcttcaggacaagtggcgaatgttccgcaggggtggtggcattatgaagtcgccacttcagacaaaacccaccttttggccatatttgacgccccttcgcctgaagtgatatacggctcggatattctccgtctgacgccgcctgagatcatggcgcatacgtactgtctgaatgagcatgagtgggaaaaagccgtttcaccgatccggcaatcaactgtgataggccccgataaatactgcggacagactgaaaacacggggattcatgatatgaataagccttatcagccaaatacgcattatccgaatgatccgtatcggcattatgatacgccgttatattggggatattaaacggagagccagagcggcatcgacagaaagagcccctcattggagaggggctcttgatcattacggtccggttccgcagcttactttgtactcgccttcggacgatttttttgaataacatacgtgcggcgtctgtccggtatcatctttccaattgaaccaatttacataataaaggttcccggcctctccgctgccttcttctttttgaagaatcgcaaagtagctttgatacggatatccttttttataaatgtcatgcctgatggctcctttttctgaagcagacgtgaagacgacgggagaaagagccgggagcgctgtcaaaaaaagcgtcagtgcagctgacagagataatataagatagattttctttttcatttttctctctttcctttattttgagttgttagaaatgaagcggaacacagaggctgctgcagaggatgaaaaaacaaaaaaacccttatttatagaataagggtttaaaggtatggagccaagggggctcgaacccctgacctctacgctgccagcgttatccctgcatactttctgatattctgacgtaccctacaaacgttgatttaacaggctttatagtctttttaatcctttttagtactttgatgtaatccgttataatcaggattttttaaaaattttgttgccatttttgttgccatttttatttatttagccggttcttcataaatgactgtatagactgtttgaacataacctgtcacatcttttgaatcagataatttaatatcaatgattttcatgtttcgtttatgtaagtcctcaagcgtgccattcaacttgtctttctcaacatcagtagccacttgtacaagtccttgcttttgctctttttcattagagtctttatcactttttttcactaaggatggttctccacaagcagataataaaccgatagataaaagtcccacaattagtattctcttcaatctaatcacccccaatggcattatactataatagacggcatcccgtttcgttactccatcgttctctcactctgcatttttgcagactgaacgattcgtgcacccagccttctgacatcgtgaaatgcgactccagccaatgtttagcgctacgtcaaattgaagattcgatcatctattgttcaccgaaattttcggtaatcatttcgtatctgctcaccttttcggaatttccgaaatcattttagagttgatcacgcaaattttacctgatcatattgtgttttgaattagttcgtgacaaattgtcacaattaaacgatatcttttagtcgtgcaaattttgtacgagctctatgctcaggtcaatttgaccttttgctctaaagaacgcatttttgcgttattaaaatacaatttgttctaagggtgggaaaagtccactttctaaaattctgagagcgcaaagctgctctttctaaaatttggtgaatccaaaactggatgctcgtaaatttagagaacggagctttccgttttgatgcaatgtcgttgttattttaccaacgagcataccgaggtcgtggttgttttgtctacgaccttattgtggtctggattgagtcgttgctaatttgtcaacgagtgatataaggtcgtatacgtattggcccaactattacaattggcaatagtctcagcccccaaagttggggactcctcaaaattgaggagtgacagatatagatgattaagctctgtttcgttccccagaattggggaaccaatggttcatttaagtatatagataataaccatatatacttaaccaaagggtctggttcaaatgaacctcacaaacgccccttgtactcattcagcagcgttcttcttttcgcttggttatagatcatatcgtaccgtattctcgcctgtctacgttgtgatattgttaacctcttatctcccatcatcttgtgaaacatttctaagtcctcgtgctccttcttggttacagtcactttcaatcactttaacctccattcatcgtcaaaacttttgttattagtcttgacttttcttttgattttttgcttgattggttgagactgtggacaacggctggacaagttgtctgcctgaatttgcttgtaaaaaaataaacaaactcaggcaggcgactgaaacttgattgtatatcaacttgtggtatccgtgtgttcaccctatttgccgttggttattccccaaacaagcctactgtgtcaagtgtccctaacaggttcagaaagtccaaaattggactctcctacttatggcttgtcctgcatcgtcagaaacgatacacccttccttcgtcagcacttaatggcagctttcgcctttcagatgcatgtgtaaatagggaaacacagaaggcatcctatcctcatttattgcgtcggctgagtcactaccctgtcaagttttacgtgtgttagcgcattccacggcagtctgacccttaaaaaaggcatcactaaagacaacaccttaattcaggagtatagactgactgtattcagttaaattgaaattataggggacagggagataattccccgtcctctctgtctatttaatcgtctgctttccacaccgtgaagatatcgacatactcacttttaaggaaagcaagctcactgacttcagataccatacattcaataacatcaacggtaggacatttcttgataatccactctatgattgaataaaggcgatcattgtaattgcatgtaaacctttcttttaacaatttatttcgcctatcatatgctttaaattcataagtggtatatgtgtttttcatttcagttatccccttgattaaattgtaatgtttaaatacaatgggagtgtactaacccatcagattaggagagtgctggtgacactcttcctaatcacccaaaccaagctatacacaatatgcttaaagctggtacagctacgatcaatcccccaaatacaacctgacagaaccgctcgttatgtaaatccgtcttactcatcttcatctacttctaccacagttgctttttcatctatgtaaaacacattgtctgttatagttgggataactgttttacctccccccatatccaacatgatatgagggaaattaacacccatctctcctgcttctactaacgctgctattccgtctttccgatcattcccatcaagttcaacacaaaccggtattgtcatatctgtgaagattctgagacgctttttaggtttcccatcgtcgtatgtttcaatgaagttgtttttttcttcgaacatcttccctctgaagtaattgaaatgattcgtcatttcctcgatgcgctgttcgtttgtgattgcccctaagcttgctacgttagttcctacagtgtgacggttaatttgcattgtcgttatcccctttagtaagttttgtttttatctaagatttgaaattcatcgtaaagatcaaacaaggtagggtctgcaataaatacatcccacaaagtcgtattaaacaatttgtcaatcactgcgtttgttagacttctaaggtttttgtatttaatgtccttagcaagataggtacttgtcagggtgtcgtacaatccgtcccctctttttaaaacttgatacaggatgacttgaccatcatccccggctattgcaaactgcttgtaaaacaacattgcgggtaaattatctgacccttttgtgcggatgattatgtgtttcattccactcctcctccgttagtaaaactcaatttgttttacttgttgagtataactatatagtttaactcattctttgtcaacaaaaagttttacttaatgagtaaaagatattataatacaattaacaaccgtatggaggattcgttatgaaacaatctggcaagtccatgagtgattttaagtttgtaccaacactcagcaaaacattgaaagaattagatgatttaacaaggaatgctttagcagttgaagcaaaagtaagaccggctacaattaacgacattgctagtgggaagtcaaaacaaatcaacatggaaactctcaatgcaataattgaaacactaaacacatttgcaaaagaaaaaggacttgataagaaatattctgtttctgatatatttgaacacgaagatttccttaaccaaaagtattgcgattaaaaaaataatcgttaaacaaaaccattgaaatattcaattgtcgcaatttgcgacgatcaaaagtattgcaattgctgttatactgtacggagaggtgaatgggatggaaaacaacatgcttcaagcgatattagatgagattaagaacgttaataacaaggttgatgggatagcttccgagttgaattcctttaaagaagatacaaagaaggagtttgaacaaatcaatcagaagttagatcgaatggaggaaaacgaacctgaggaaatcatgtcgatgctcaaattaatcaataagaacattgagcgtgatcaccgatacaatgacaaaaagttttctgaaattgaaagacgtatccatgatcttgaagagagattgaataactaagcataaacggtatacgtataccgatttgtgacaacataaggggatggggttaatggaaaaagatgaagtattgcgatatgttgaagataaaaagactttagcattgaagaaagcaagtcaagttcttggtaaagaaaccaattgggaaagctttaatggaattataggcgggaaaaatgatacatatagtttaaatatatgtgaccatgaaacagcagagagctatgtaaatgcttggttatccagccatcaaaagatatacaaaaaagagataaatgcatcatacaggaaatcatcccacaaaatacacgatatgttacaagatgatttcttgaaagagtatattaccatgttcctagctagatcatactttaagaataaaaaataaccactttccatacgtggcaataaaaaagaccccttcacaaattgtgagggggttatttagaagaaaactttcccttcatgtcatatccaaaatgctaaatcgtggtaaaatataaagaaaattcattattgaactaaggaagggaaaaatgactgaattatatgatttcaagacgcttgcaatggaatatccatccatactagacaacctacttataggtaatggattttcaattgaattctataataattttagatatggtgggttatatgattatttattgagaaaccaatttctaaatggtcaagaactagacttatttaaagcatttgaaacgactaattttgagttggttttaaattcacttcacacggcacaaaaaattaatcaaacattatcaatagtcacaaattatttagatgacaggtataatgaaattaagaatctactcattaaagcagtccaagatatacacccattatattcacagttggacataccaaaattagcttggagtctcaatgtatttaaaaagagtattttcaccactaactatgacttattatcatattgggctttattaaaattaaaagacctaaataggaatatacgagatggctttttctacagaaatacgagcgataaaacactgacttttcaacctgatacctttgaagaaaccgaattaaagctttttcacttgcatggtgcgcttcatttttatgaagatcaaggagaaatcataaaaatcaaggccaaaagtgaatatttactcccagaaattaaacaaaagtatgaaagtggatattttcctgtttatgtgtcagaaggggtatcggaaaagaaacttgcacaaatccatagtaattattatttaagttattgttataacagttttatagaagctgaagggggcataacaatattaggccaaggacttaatcctgattatgataaacacttgatagatgccatactacgttcaaaagtaaattgtatagctttcggagtttatcccactgaaagtgatacaagtcaattcattatagagactgtaaaaagacaatttggcaagttagatggtaaacagctcatattttataattcaaggactttttatgagtatacaaggagaaaatcttggggccccttactagcaccaattaataatgagtacttcccaatattttaatgaataaaaacagccctatccggttaaggatagagctgtttttattcttgtattgttgttaatactccattgtcgaaatataggtatctgctgccgtaaacccattgttcgtttattcctgatgctgtcgttgtcttatgaatagacataggcctgccccaatctttaagttggataacttcctgcttggtcatgccaatagcaattgtcttctcctgatattcttcattttcagactgttcatcatcattttcgctgtatgtaacttctcttctttggaaaccagttgattcaggattatcatctacacgatcttttattagtaaagtgttttcttcaggggtatttaatggatcataatcaacttcatatctaagtaccttatcgtgtttatccgggtgaacaaaaatatgagctatcgaacaaaccttgtctttcccacagtctattttattcaagttggagtttttctgcgtaacttccattacttcacccactttaagtaacttttctttatccgataactgggtgaaagatggcttggctgctaaaactaagtcgtatactttatcattagatttatcggttttagacatccacacctgattaaagtttttcttaactcccttatcatttcccactttctcagcaattgtgtctaaattactggtgtccaatctgtttatgtacatcggaattgttatagctagaataatagcaactaccacaacactaagtgttgatattagaagtatgatcttcttttttgacaaattaacctccccttcccatctttacttattatcggttatttcactcactattccaacaaaaaaaagacgtatccaataaggatacgcctgtttagttcacatgcctatatgcttcccatatatacttgatgtttaatttattccctctttgattgctgtctgagcctgttataaatcctagtgcatttatgcttccgtaggtagagtttccgccaattagggatattcccatttcatttacctgatacatataaccccctgtctcatcaattaatagcatggattcattggaagacactggccacactttcatatgtgttggagtgaaaggcagcaatatctgtttactaattgttccatcgcccacatacgttcctttagccatctgaggaacatcagaggatagcgcatattctgagtgtagtttacccccaagaaactcagcgttgccatctatggaacctataatgattccttggtcattacgtacaggtattgtattaggcgtggatagcgttgaagtcgtgtaaccatttaatgaatcagccgatcccgcagaagacacaatccactcttcaccattgaaaagctcttgtttattagtctttggatcgatccaaatcgttcccgcttctggagtttcaggcttcgctactgatgatatagtatacaaattgtttacttttccattaaggtttccactcacctctacagtagaagaagggaggtaggggttttcgtttgggtgaagggattttacgatgtcagatccaataaactgagttatctctatatctgcatcaactcgtcgataggcttgaatgccaatggtgtagtatttattagagggcaaccctgtgaacgccgcagctcgtttgtcatactttacattcttcaggtcttcactggccatctttgaaccgaaaacatattcatccttatcgttgctagaatatagatacaattcaaatccatcaatattatacttgtcttcatcagaagttggataatcccattctattgtgatatctactgatccatcatcattgtttgtatgggatatagccgtgccgtcacctttaataattggagggtcaggttttacagctattctgtcattcctaatgttgaaattttcagttgcattctcccagtcaatttttcttttgttataatccgtgtttgtttttatagatgtatacatcatattactgatggtttcaaaatcgcttttaatcttctttccatttgatattgttacatccattgtcttttgagcaaaatcaaaattaaatgtaacaagtcgagctttcacatcagtcttcagttcttctgatctgattctgacagtatcgccaagtgaacacctatcccagttatgagattcagaaagacaattgaaaaagttaactacatctaaggtaatgttaattggtggcgcatttctattttccatctcctctatgctcttttcataaagttcagtttcatcaaatacactatcattcgaccattctccttccagaataaaaactgaaagttcttctttaagatcgtctgtaagatatttttcaaatttaagtgtttctttaagctcagaaatggaattttggattgtttccttatctttatctaagatagcgatctgattaatcttggcatcaagttcctgaattttcatttgtaattgggcttttaattctttagtgtcatcccctgcttttttagctacttcaatatggtctaatatcttttgtttttctagttcgagtgtgtactgttcatttttaagcactgttttcttttcttcgacttgtttttgctgttcaagtaacaggtgaaatttattcccttgtttattcacaatcaaattgtaatccaggatagcatgacaaagctcattcgacatgtaattacttttttggattacgtttctgttttcatcacgattaaatgggtaaaggaagtatgagaaatcatctatatatgcttgcccagtcggatttaccgagttaatgcctattccgtctttccctgttggatatagtcttgtggtaacttcctctgtgtcttctatatcatttatgtcaactatatactgtcctgttttaaaccataatcctttgtacgtacctttatcagtatctttataaaaactcactgtcatattttctgtattaaaaagaggtgttgctccaaacttttcacatattgtatacagtaaatctaatttagtcgaagatgtaacatcaaattgcctatacttagtattcaattctgtatcaatatgatctactttccatccagtgtttttaaggcaagaattagctgcttcttttaaattaatcgacgtttcttcaaatctccgcactttgtatttggtaagcaaaaaaggcaaagacttgcattcgtatatgtaagaagctccatcctcgttcattgattttgttcgttttgttatcacaaaccactctgtcatcccataaaattcagctttaataagataccatggtttcaataattctaataaaggattatctttgtatctgtggaaatacccccacttcaaaggaacagagaaagacaactcatgggttttcccatagttcattgtgattgtctcattgaatttatcgactatgttccctatcttcttcctattgggtttcattaatgctaatcgaagatctttcacctcagtatgtttgcttattctcaattaaaaaacctccattcaaattaaaaaaagagccggcattttagccgactcatgagttattgaaatttaaccccttgtttttgaggccatttgtaaattgcttgtacattaaatcaacagctttctgaggattcccagtttctttaatggttactgtaaagttaaagtcgttgtttactgtagaagtctctgttttgttgctaacaagagaatctggaacgtttgttttaacgtttgcgcttaaacttggtattccaaacttaccaccagcaaacgaaacatcactaagaaaatctttatacttacttaaatcaggctttgcggaaggggcaccatttaaatctttttctgacaattcacgtacagtgtctactgctttaagcatatttttggtgtctgactcatttaagatgagttctccactatccactactgcgagagcgcccgacgccggtagtttacctacatgccctccagttttaaacctggcaaccttttgaccagtggtattgcccttggtcacagtattcagggcattagaggcttctttaagcttatcgataaggttattggagatacttttcccaatagactccatattgctgttaatgaacttagagaattcattaagctgcttggagatgtcagtgattttgccgttcatgagtttgtcttcaattttcttgaattctctctcatcatttgtcaggttatcatatttgtcatttatggcatcctgatctttttcaagttggtcttgaagtgcttccttacgtttcgtattactacgatctttaagaaactcatctaatgcttcttgctgttcttgaagttgcttttctaagtcttttacctgtgattttgcttcatctgaatcatcaagggataatttactgatcttttctttggtttcctgaatagcctgattcttttctttgagctctttttggtatttagcttcatcatcagttttatcaatctcatcaatcaagtcttgcgtagctttttggtgcgcttttaattcaatatcacgcatcttttcgtacatctctttgtatatagagacaacttcatcagcaagggatttatagatgtccttgatcgactttttggtgttataaagctcaagattaaagtctttctgtttatctttccaattttcgatctcatttgtaatttgctcttgtatttccggaaatcctttagctgcctttttctgttcctctaattgcttgatgtattttttagcctcagcctgttgttgctgtactaatttgacttgctgactataatatttgaccttatccttgtctttttcagtcattgatattttattgtcaacgtctttgatcttggattcagtcttgtttgatgatttttgaattgactttaaagtttcatctactttagattgaactatttgcccttgcaattcccttacttgctcttggaagttaataaggtctattttagcttgctttagctcttctttaagttgagctttttgggctgaattcaaattcttattagctgaaatttctttttgtatccatgaaaccttttgactctgaatcttttgctgctcagccattgcttttttctgttctgcagtatattttctaaactgtttactgtctgacagataatgacttgctaaggcttggttcttggcaattgctaaatcatagtcaccaatacgcttatcaaactcatcaagctttgactgtacaatttcgtattgaagctcttctatttgttctccaacagaactgatatcaccttggagggagaggaggtcagatttcgcttgcgctattgcttgttgtcgttctgcttcagcttgggatgcatctgaaatagatgtaccgacaccttttaaatacttctcagggtcaaccgtctttccgttttcctcaatttgaagatgaaggtgatttcctgttgaattacccgtactaccaactttaccgatggtctgaccagctttaacagtttgaccggctttaacagaaggggtatcaagcatatgcatatacttagcaacttttccatcatcctgttgaatgacaacccagttaccggcagttttactataaccagctacttgaactttaccactttgcaaagacttaattgcagtaccggcttttgcggcaaaatctgtccctttatgtggggtggatcggtaagcgccatcttgcgcattatatttagaacttattctaaaagcgctgttcttcgtgtagtagcttgcaatggatgaattagcagaagtcattgacttagtgtaattagacatgatcttctgaacataattctgcgtttctttgaaaggagggatgccaccatatttaattacattaccaggccctgcgttataagcagcaagtgctttctcaacattgccaccaaatttgcttagttgttgggctaaatattttgtgccacccataatgctctgataaggatcataaacattgtttacgcctaagcttttagcagtggaaggcatcaactgcattaatccagctgcgcctgctccagaacgagctcttgcattgaatcctgattcttgctgaatcacagctgcaattagcactggatcaacaccatatttacttgcggcagaattaatgtagctggagtatttaccggagtaagacccgccaccggaagatgaaccagaggaaagggaagaggtaactataccgtattgtgcaatgttccctgacttaatttgatccttgaggagtttggcttgctcctgcataagctttttcttttgttggagttctttgatttctttctttaggttatctctgtatttttgagaccattttgcatagtcgtttaacttcttgttttgttcgtcaattacagatgataccttttctaaagcctctttatacttatcagttacataagtagatgttttagtttcttcattagctttctcttgctcgtctgtccatttttcaagggaagtacctgattcgattaacgcttgtttatttgtttcctgagtagatgtagcttcttctgatgctgagatataagcctggatagctgatctcacactatccatctgggatctttcactatccgagtatccaccaggttgtaacatttgtttttcgatcttatgcaattctttcttcgcatcagctacattattaattgatttaacttcaagctgagacaattcagcttcagatatatcgagcttacgctctcttcggagctttctgaggctgtcaatccttaatgtatcagcgtttaaggtcttaatagcgttgttaacctcggttttcattaggtgattgctatatcgaaccatgtcatcatacgcatcaagtttaacttttcgctgacggattacttcatctcggttaacctttataacaccattttcataacttattgctttggctaattctttatctttttggattagagtattagcttcattggcagaaatgctctttccttcagccatcttttctaaaagttcatttaaaggagcaacttgttctttggtgttattaaaaatatctccgttaaggatatcttgaacagagccaaattttattccttcagaaagttctttaataagatccttaatttgactgatatcatttgcatcaagtgcttttttaagcttttgaccgaaatcatcagcttcgttacctgcttcagcaagggtttcacctaaatcaccaacttcagatttaacagatgaaacggctttgtcgccatctttaatgttcttttgtgccttatcaaaactcaacttaaagacatcaattgatgaaccagagtcagcataggtctctaaaagggtttgcaggtctttttttgcgctatcaaatgctttttcatcgtttgaattcaacgctgattgcattttttcttggagtttacccagtgcagaagagaatttttcaagatcctcaggattcaagtcgtcttttagagtaagtttatcaacaatatcagcgagacttgcctttaacgtattgctgatatcaattttactgtaagcttctgcaatggatagtacgctgtccctaacttttgcattaccgctagagatatcattttgaaccctatttatattccgctgtgctttatcagcttccaacttatagtcattttcatctgaaataggactttctaagaaagaccagaaattcttgccttttgaatattctttggccatcttctcatactgcttcagttcgtccttagacttttcaattccttttgaagcgtcttcgaacgtctttctagcaccgtctttcgtctctgtctttttgagctcaagatattctttggtattcttaatagcctcctctaaagccttattactctttagaattgcattaccttgagaatcatagcctttaattaaagccggaaacgattgtgctaattgttgtgtaacctgaaggtattcctgttcttcatcagatgtaagggttcttgaatctttagctttttgaagatccttatactgtttgatcagtttgtctgtagagtctttgttggttgtaatggcttcaatgttggtttgctgactttgttcaaagtcttcttttgctttctttgcatcagcgaatgctgtaattattttttctaaagcaaaaccaataccagcaaaggcaacgcctactactgtagatgccaacatacctctccaggcaacagtaaacgaccttgtagctattgtagctcttgtcattcctgcttctatcccaattgctgctctttgggcttcagttaaagaattcgccccaaaaatcattgctgtttgaagcaaacgcatattcttattaaagccaactacagcaaagtttgctgtcataaaagcaattggaaggaatccgataccctttacagctgaagtaacagctttcagaagatccccaactacagatacagcattaattaaaccatcactaataaatgcatctcctgatgctacagctaattcagtgaacttattttgaagtttatttaatcttgcctgtaagctatctgcgtatttctgttgctcgctccatgcactccctgtggaattagctgcagtggtagctgcattctgtgcaatagagaagttgttcatcattgcattaaatcgagataattgatggatgtttgcaacgccaatagaagtgttttgtttttgggcatcagttaacgtatcccatttggctgctacctcattaatcaactcacttgctgacttagcttctccacccgcagtctttacagaaattccgatctggtctaaagctttaattgagctttcgttattcccgatacgtgcgaaaatggttttaagtgagttaccaaccacattcccagattcacgagtggtacttgcgatggccgtggtgtatccgattaaatcatttaattcaacaccaaatgttgaagctgttgaaccagcttttctaatactgttagccagatccattgtagttacagcatagttgttatcgacttcattaagcttatctgcaattgaaatggaatcgtttgcggcaatattgaagtttaacattgcggcagttaatgtatttacggtgtcatcaggggtgagatcggagacgttctgaaggacttgtgcagttttagttaaagtggagagttcactttcatcaaaacccatacgtccaaaatcaccagtcatttgaagaatatctgagattttatttgatagggaatcccctaattcaatggacgtttgaagaagctcattaaatttgtagtctggttcatccattacacgacgaatgtttgtcatgagcgtatcaatttcaacaacctgagaaactattgatttaagagcagtaaccccaccaaataaagcagaaccggctagcatgtaagcaggcattccagtaaaagcttgctttaatttctcaccaaaactagatacttgtcttgaagatgagcttgcattagattgaatctctctaaactgcatactaagactttgcatctgtctagtaatatttggtgtctttacattgagctgattcacagaattaatatagttttgcaatgctctggagttctcaggactgatagatgttccatacctatccgtcaaagatttaacatttaatttagcttgtctctgatacaggcttaattgatgttctaactctttagttctagcttttaatgctgcagagtcatccaagtgtttcattctgttagcgatctgatctatttgagaggttgttcttgcggcgttaattgaactggatagtctattgaggacggttgaggatagttggcctttttgtctaagctgctctaatttttggtttagtttatctattgccttttgttgctggtcaaagttttctgtggttttaacagctaaagttgccccgtgcctatctgtgctatgggtgacatctttaaactcatctctatatttagtcactgttccggtgacacgacctgttgcatcttgtttcgttactttcttttgagcttggccaagacgctccatttgctgcacaagcttacttgctgcttttgattctcgttccagactctttgttgagttgtctatgattgtccgtgttttctcatggatttcaccgctccgcttatactgctgtgtaagcctagtgatagaaccatctgcatttttagtctcagtaatattttctttgactgtctgattaagatgttttaatgcctcttcactttgcttaaaagcacttgaaaacctttcaagagttcttagaactttgtcatcaaagcttactttgagattcaatggattgattttattttgaagtgtggatatatctttatttaattgctgaacagtcttatttgatgtgtcagccacaggagttaatacaatttttaaattttgagacacttgttctttcacttccttagtaatttttctacaaataaaaaaaagaagtgcctcaaaatttaaagcacttcgtttgtttacttagtgggcttgtgtgcgcctatatagttaacgaacacctcataatgtcttccccagtctctaggtgggtaaagaacttcatactctttgcctttatgaacgactttaacacctttatctaatttttcattaggcgggcagaaaatcatattggttatgtcagttattcttcctaccgcagttggagaactaattgattcaacataaggctgaaaagaacatttgtatggaactagtgtttcttgatcttcatatatgtctgttccccaatcagtctttttacctgtcttcacccttttaacctgaattaaataatatagatcattgaacttcaatgtgagtcaccctccagcagtgatgtaaggggttttaaagctatccaattcaagcttaatatcatcagggagtttgtcgtaatagctttctgaaataccccctcttgtttccgcttttgtagcctcaacaccctttaacctatacttaaagacagctatatcctcaatgacacctagcaaattatctggaatatcattttcattaatctcacagtaattaattacaaaacgccgagctttctttaaataaagttccaaaagagcatcttcagagtcatcagcaatatctaaaaacaacttcaaattagccaattgatccattctattcacctgatttctcagttttcttctgcttctttactgtttttttcttttccttatagccttgttccttataaattaatttaaaggccttttctgtcaatttcacttcattaccatttggatcaatgtaatccttcatattaagcacctcatattttatttagattttttatgataaaaaaagagagaggttatcctctctctgattaatcttgtttatcaaccttaggagtgattgctgcaaaagcatcttccttaataggtaagaaaccaagtctcatagttgccttaattgcaatcatatcgttttctgcaagtgaaagaggtttaccatcgcccattacatgaccttgtagtgtagcttccttcaggatttcatatttcaatccttctcgaataccaaccaatgagtaatcaaagttacctaagattaaatcagcctttgttttgtcaaatccaccatttgaagaaaactcaacagggaatccgtacaattcattttgtgatacaccaggaacataaatttgatttccgtttgtgtctcttagagtacgtagagtatttttaatacctcgatgccctgcaaatccagttacatctaatcctgcatcttcaacaagagccatagcatttgaaacgtcaatatcaaatgtgccgccggttccgtttgcaataagatttccagaagcctcagcagagccaaacaagcttttcttgaacggagagttgataccaaaaagacccgctccatcaatagtagtgtaaaatgctttttcaatttctgttcgcagttctgagaaaacgttgatagtggtgtcatttaatttctctttagttactggaatgattacaccgatctttttagcttcaagttcaggatggatatatctcacttcggatgtattaatccgttcagattctcctacccagtatgctccaggcccatcaaccaaaacaggaattttctttttatctgattccataggctgaaccttagataatttgagtaatgttgaacccttggtaatgcctttgatgatttctttttgaatttgtgtaggtacaaaaccttctaattgatcttttaaaaatgccatttataatttccacctttattctttattttattatttctaatagttttatagtcttgattgattctcataaatagctgccataaagtctgaagaggatccagctttgttgttatttacagaagcaggaggagtatagctgctattcttcaatcggtcttcaacctgttcttgaatatacggcttcatagactcttcaaattttgttaagtttcctagagttacctcttcattatcagaaacaagcaaatcaattaagtctgcaggaatctttttatctgatgctgtttttagtgcaatggatttcattttctcaattcttgcattgcgttcaaattcttcatttttgagttcaagttcccgaattcttttttgttcaggagtttcatctggataccgcttcttaatttcctcttcaagcttctgaggaaatgtgctttccatccatgagtttaaacttgtggagaagaatctatctttttgcgactgcatccactttttagcatcttcatctgtttcaacgaactgtttaacaccatcaagtgttacaggctgcaacccttgaagatattgttttacctcgtcattatcttgttgttcttcaaaaaactttttaacatcttctaaattcatttcaaatcactccattcgccctttctagtgtcagtgaccctaaaaagtgcatatttttacataagaaaaaggctctatttatagagagcctgtagtattgcttatctctaatgatttaagttttctttggtgctcaatctcttgttctcttgcatattcttgttcctgtcttctcttctgcatctctacagcaggattttcaacatacggtatttgggctagtatcgtttcccatgaacatacttcagataatttgcttaatgaatcagctaaagcagtaatatcagaagggatgttcattgttaatttaagcttaaccttgcgatgatcgtattcctcgcctttttggatcttgataaacttaaagaagttctttaacctcttcttaattgctgtttccagcatcgcttgtttaagggaacatttattttccaaggagattaatcttgatctgagggctgcagaagataaattagattgaagcttttcatttgtgtctacatgactggccaacttgtacattttctcttcaagctctttcagcaaattttggacaaatttatcatcaatcttcttaataagataatcaacacttgcttgtgtaggcacttgaagaatacccgttttcttaaactttgctgcgtcttcatcagtgatttttgctccggttattttcaagaaagcctgtctgaaatcagatacctcattcaccaaatcagataaagtgttattataggcatcattttctgatttgatatcatctaacatacttgttctttcgtgatttgcggaggtcacttcaattggaggtgtatcgaagatatgtgtacgctgccccacataaattagattatcgctcccatcaacatcaaagtgtaagattgaattacttatgtaaacatctactttttcgttatcagaaaacaaatcatttttgtatatatgcaatgctaaaataacgtctttctcaacatcgccttcttcgattacaaagcagttcattggcgttaatacagcacacttaaattcattgtctctggttgtgtattggatttcatatgcttcgccaaatttagttgcttctagcataagtttttgatcgtgaattttagaccaatgagagaagttataatcaatcacatcaatcaattgattatttccatctaaactaatataggtcactggattccctaatgcatacgcaatttcgtcatgaataaattttttaaagaaattcacgactactttcatattacttctactctcattcatagcgtagttcctcattatgctatgatgtccattgtagtattcttcgtatgttttataagtctcctggttttctctaagctttctaagacacttcattaacaaagtttctaattcaggagttatttgaatttgtccatttctttttcgctttaaaactgtatcaacgatgtttctcaattactcacctcctttaaaataatgctgacctatctaaaaagttaatgtattgcacttcttgtagctcatcaataagcctgtcaaactcagctgtaatatcaggagcatcatcaaaacgtgtaaacttttcaccttcataggccattatttgatcagtaaactctttatcttcttgaggaaatacaataaaaccactgtctacctttccaccaatggctctaatcttagcttctttgtttttcgtttgatgttcattaatgatttgaatgtctcttgctgttagtgtacgatctttattaatttctctttgaatatcacgtacatctgcaccgctaaacacgttcttctcaatccataaatgcgtgatatctgggtattctttcaataaggatatcacctttgcaatatagtcatcgtattcaagtctctcaatacacgctttcctaacccatctaaagttattaggagtcttagaaccgacaataaaagcagaataatcgtgactatcctgtacctcaacggctggatcacaacaaagtattgtttttatgaaattgtctttttccttttcaatttcttttctaggtaatgtcttgatatcatggaaagctttctgccctagcttagacgcatcattcatcatttcttgtttaaatgctgaaggattgggataatacttcccaacagcaagatcatagcaatcatacttatcttcccaaagaactgggaatttcatttcttctttatgctctaagtagaactttttagcatcctcttctgcattgggattggttgcgtcatatcgaattttcttcaattcagcccatttgccactattgaataattcatcaatatcgtcaacaaggacggctttcttcacgatccgtttatactggctatcttttaatattcttgagataagacagtctctatgcagaattgtaccgagcataataaactttgttgccatcttgaccttcttgccatccctgtaaacaggatcatctccagcatattcagcatcttgtgtccatgtattgtatttcttatctcttgcttcttgagtaataacatcagctgccgattgatagtcatcgccaataatgcatgtagggcgcactccattgtgtttcaatccacgaatagatgtcccagaacttatagcttggattttacaaccgtttgagaaatacattttcaacttaattgaacgtgtgagcatatgtccaaatgtattgattatgtaggggttctcaacaaatgcctttcgagtatcattgataaattcaaccgcatcatcctctttcttcccagctacaagcgtaaagtaggatataccgtatgctgctaaatatgttgataaggcaaagttaacagttgttgtcttagagctaccacgaggcatacaaagggaaagcttatcgaattcatctttaatgaacatatcatcaagcgtattccatatttcaaaatggaaatcaccgagtttacgagctgtattagtgggttttgcttggaaagtatcctggaggtaatatagacaaaagaattcaaaacttcgagccccaagtgaatgagctactccatttttaccgaagagattcttccccttcatcattctgtttgtcctcattactgcttcatcatgagttgaaccatttttcaggtaatctctataaagatactctctaagcaaattcctgttttctcttgtgttgattaaatcagatatcccaatcacctccgagttttaaaattataataaaaattgtttgggttgctatcggatgagagggtgttcaatcatttagaatgccccctattattgataactagcgtcctttctggtgcgtttcaaacacatttagcctataggtatcagattacgcatcaatgcttatttagcctgtaaatgccttttagagaggattctatcgggtggttttatactcacaaaatgacttacttataccataaccatagtttgtaaaggcatacgtttataaacgctgtctatctcagcaacatcacgtttaaaaaggtgttattttatttttataaacgtttataaaatgtaatagacctttacaaacaaaaatggtataataaaggtacaataaatgagaggatgacaagcgatgatttctaaaatgtttggttacataagagtaagttcaaaggatcaaaacgaaaacaggcagatcaccaatatgcttaaagaaggcattactgaacgtgatctattcattgacaagcaaagtggtaaagacttcgaaagacctgcatataaaacactcaagcaagttgtaagaacaggtgatactgttgtgtttgattcaatcactcgtatgggtcgtaacatgaaagagactcaaaaagaatacgattggttcattgataatggcattaagcttaaattcattaaagaaccaatgatcaactcaactgaagatcaagacgatattcttaaagaagctatacagaagattgtattgactatccttacagcctttgcagagaaggaaagggaggacataagagagagacaagcagaagggatcaaagatgccaaagaaaaaggaaagcacttaggacgacctaaaaaggggtttgacacattaacaaaagagcaacgatccacccttgaatcaggctactctaaatggaaaagcaaagagattacaggtgttcaattcgctaaagacttacagcttactaagaatactttctataaagtgataaaagaatatgaagcacagctgaccctagccaattaataaaagctaagggtctttttattcgtcttcagatagctttgaagccgtccactcttcttcttccttagccaatacatcttttgatacattgtcattgcttcgatcatctttgatatttaaaatattctctggattaccctcagtgtatgcaagtaatagctgtgtagccttcacccttgcattatcgtttgtggatgattcgctgatcttttttaaattttcaaagaaggcttttgtatctcgacttacttcacgtctaactgaaagttttttgtaatgtaaaagtctgtcgtactcctgcgagtattcttcttccttttcccagttgtacagagtcggtctggtcactcctacttccttagcaatctcagtcctattcagctttccttccactaataattcaattgcttttaactttctttcatcaagcataataaattttacacctactttattttttacatttttcttgtgataagaacgctttaagatcgcacttacatttagcatatacaaccccagattctatttcgtgtaatccttcaggttccccacagcttttacagcaagccaattcattttctacaaaggcgttcttgtatacttctaatgctttgtctttaaaatacctttcaaatgtagccagtttagtctcataatccttaaaactgatcttttctgaatcaatcagcttattttgcctaatgacatcgacagtttctctggattccggatgaagcaagtgaagtgcaattttaacgccataatacactttttcaccttcatctgaattctccatatacacattgtaatcacaaacctcaagatacatgtccacatctaaagttgttttaattcgacctatttttttagctgtactcattttcaaattcctccgttgtatgttgttttatttatttgtctcgcttcataacacaaataaaaaagcacccgttgctgcggatgctttaccttttccttttataactttcaatatcttctcttaaaaataaacggtcacgacttgttgttttaatgggtactaatttttcacgatcgaccaactgttttaagttttgacgactacagccaattatctcaatcgcttcagacgtagttaaaatttcttttgcaataaaatcttttaaatcgtccatgctgtcaaaaacaatcttagtcatttcgaaggttcctccatttaaggaaaatgtttatgatagtaactaccaaccagattaacgctaataccattgttagtatatctaaggtgctgagatgagcataatcaaaattcgaaaacagcataataaacagaataaaaaagaatattgttgtgacatcaaccaattttttcatgtgttttgagtatggaatgaaaagtgttataataataagagaaggggaataaatcccctctagcttatgagcgacgtttcttcttggcgggagaacgtcgttttttgtttttgcttgccttcaagtccttgatgttcttgatcatggttgttattcctgctaggattgcaaccacccaagccaagtcccgaaggataagctctaacttttccatactcatttcccctcctttcttaacttaattataacacttacgtttactatcgtcaatctatttattttatttttatccttatttttcacttttttctagcatgaaaggagggtgctaataaatcccacatggtgttttctgtccttgttttagacatttatagtcgctcgcgaatcgactttgtttaaatctgaatggttatttttcttctagttcagctactgtattaataatcatctgttcaaactcttcagacttagcagatcctaatttttcaaaattggatcgaagtctattagctatgatgtttattttttcaagtgattctataggaaactcattaaagattggataaaggagatcagtgttcattaactcgtaataaaactcaaactgtttcttagtatcatcaggaatatccaagtcactgaactccttcacgacattaaaacttaaccaatcattcatgctgatcttactcaaatcaataccttgctcttcagcttctaatagggctttcacaaaattctcaaacatcttttgtagcttgaacataccaaactgaggataaatgtatacatgatactcatcattgatctgaaccttttgtttcttatcaacactttttgatagtgtctttacacctgatacgcttaattttttcgatgtcatttaatttctcctttgctttcattattttcgtaaggcttccctacaatttcttcgtactgttcgggggtaatccagtctatttcaacatacgtccttatatcagcgtccgtataacacttccagtcatagaactgcttaatatctgcaaattcggggtatgaagccatttacttaccttccttcaagtcagtaatatctttttgtagttgtgcgattaatagagctgtatcagcttctcgttgtcttcgttgagcattttccttttcagcagcagccacttgtaacgataatttagcattctgcattttcaaaagatcaaccggtgaagatacccgcccattttcaatttgtttttctagttcctctttttcttcttgcgttgcggcctctgtccatgacatatctgatggatgatacatcgcctttatgaaagaaggcggctgaacgtctgtgcaattttcaggaataataaaattccctttgccgtcaggctcaataataacgggtttggttagaatgaaattttcatcatactcataaacctgaatcatgttgtgtctcctttttgaaagcccacgactacgtccagatagtagcctccgcccatcttgtttgagtcagctgggtctgggtattttattttcaaatcaccattatcgtaaattatcagattagctgttccacctgttccgctgagtggtactgattttactgctccaccaaatggtactaattctgcaggtattgagccgaacacaatctctggttcagttctaacatgacctcttaaaactaacaacgctccccattttgcgtaaatgggcgttcgtgtacctactgtagctccattttttagcatgatgttggcatatgtaatagcaccgttccatgtcttccgttcagctaccgagacgtgtcgttcttggttttcattatgatctttgaactgctgggtcatatcattccagtaaccttggtcttcagccgtaacatgaacattagtgtcattcagatgattatcaaagtcacttttagtagcttgttttacattgtctacattcccaagcccaacctgttcagcagtaaccttatgtgggtttgattgatcgtcagtatgttcagctaataaagactttgtcctttcatcggagctgttccaataactgcgctcatcctttgtgatatgtcgatccaggtctgcatcgtgagcgtcaaaatccaccttcgatgcctgttgaatattatcaaccttagacaaaccaacttggcttttagtaactgcatgaggatttttcttatcgtcaagatgtccactaaaagcaacttttgtggcttgctcttcattgattacatttgataatccgacctgttcttttgtgacatgatggggattctcagtgttcagaatatgcatttttaaatcgaaattctgcttttccatgaactcatcaactttgtcattcaagcgtttttcatgatttgacatatgagcttcagttctgaaaaattgatctttaagattattgttttgtttaagttgacctataaattgtgaattagacattgattatttctcctaaataaagaagaccttattaaaggtcttccgtccaaatatcgtcccaaatgtctttccaggctggagaattatcagaagctgctgaaagtgattcatatggatgctcttcgtcaaaatcctcttcaaagagcttttcaaaatcactcaggcttatgtaataattgtcctcctctgaaagcagtaaatacgcatcttcaataccatcaaccgttttaaactttccgcatacatcatgaaaattcattattccatcccccaaacaatcattttaaaaccagtaatatcaacagttccagatgccttaactgtcaatagtacttttggacaaacgaagggcaactgtttttggattggatagtttgaaacaaatgcagcattactgattaaagttgcgctgtcacttgctgatgttgatgaataaaaaggaatgctcttcggtactgaataagcactaactgtaactttgctatttgcgctgtcagtctgtgttgtatacagagcaacgccataagctctaaacactcctaaattctcaacaagatctaatgtgtacgactttgttgcaccaactgccacagtatcattatctgttaacacagattcctcgtatgacttttggatctgagttttaataggaactgtgtttctcacaagaactggaatagatgatttgtttgcaacattaacatcaagaggctgatcagttttaagatcaacctctaatggaatagttgaatgttcaattgatacaggcgttattgggttgccagtaccatcatcttttgcagaggtaagcgtagttccatctttatttaagaaaggaatcttcaacgcctcccttatgcacttgcgccgccaagatcaacgctttgctttggagactcagtaggtttctcaccttttgatccatctgctttacgtttaacccgaatgaaacgcccaagagaattatcaactgcaagcgctgtgaatttgatttcaggtgtaattgcgttgccggcttcaaagtttagctctgcttcaccagaaggagatattttatcgaactgaatataaagatcactatggattgtttcagtttctggatcgtactctaaagtgtgatattccatctcataagcttcagagaatgtatcagccttaatttcaacaatttcgccttcagcatcaattttatatcgtgctttaactttcacaccctcttttgcaaaagttgtagggagttgaccttctgtggattcagtttccataagataagactctccttcgctattctcgaaagaaactgcatcaactggagtcttgctaagagttacttttccatctgactcaacagtaagcgtctcatcctcccatacttgcaccgttccattttcaaccttgactccttgctgcatggccaaccaatccaaactgaagaaagcatttttgattgttcctgtaatattcttgtcggacttaatttgataaaggttttggtttccccatccgccttttaaatagtcttcctggatactttgagacaggctagttgtttgtgcttcagcagttgcaataactttcccgtcagattttcttttcataacaacgttacatacatcatgaattactgtctttttactcatttattaaaattccaccttgttttttaatttgagaataatttctctagatttcttgcttctttcttagttatgtaatttttctcttcttcaaataaatctatatgttgactccaagagccaatgtttttagcagcttccggacttacagtagagagtacaatcgcagcagagctatttaaaaaagcagcgcctctgaaaaaatgagagtgaagttggggaagcgttaattcaagaacttcagcggatgaatacccagtaaattgaacaacacaactaacaatatcggagaaatcataattgttctcagactgtttcaacgctctacttttcttgttgaatttttcaagttcagagtttttgctaacctttttttcttttaaacaatgcatatcaagaattaacttgcggatatcgtgaaagttcttctcgtctacagcttggaatgcatcagggttattaaacaccttcgcaaacactctttggtaagaggctcttaactgatccatcacattaactatgtccaacaaagttgaagcgttaaaatcattgatcaagctatccaattgaccaaatttattgttttcttgaaattcagctattatttcagattttgatttaaccatttgagagagatcatttacgaactgaggataatctttaagtctaatgaagtggcactctcctatatctgttgaaataggagtacctaaaataaagaagtcctttgaatattccattattgtggagctccaaaggaaaagataagtttatagccgaggtatccatcagggggattagctatcaatattctattgatattagcaaccttacccacaccagcaacatttttatcgtaaacaatatcaattagccggtctatgatcttgagacttctaggatcattgtcttcaaaatgatcaatatgggtgtatacgtcaatcattacatcctgggaagtaatacgcttattgtgtgtagtataaccgttaccaaagtacatgcagatccgacattgaggatcatcttcttttaaatcgtttgatttaggagctctaacaataatccctttgaggatgtcatcaaaatcatctcttcgctgcacgtctatattagcaggattactcaactctttataataagcaagattcattaactcactgtctcttgaaacgcgcttgaaaatgcctattaagtcatttgctaatttgctcatatcatcacctccttcctaaattgtttaattaaaatctataaagaggcttaccattggccatctcttttattttttcatttgcttttcttaatacttctggatcaatatttttaaccaactcttgaaacttctcatttggctcgccccatcttggctgttcttttttattttccattaccgagcaccttctctaacatcaaaatcgctttactagctctataccatccttcgccttgacagtagcattccatatcccatgtattctcaaaaaacaaatcgcatttcttacagtagtatcctgacttgaggatcttcgtatcagtaaccttattttctttcattttattattcctccaattgttttttctcatttaaacacgattacgggggcactgaggatgccccgcacatagtcatgttaaaaggagaaaccccgaaccaaaaatggctcggaataagaacaaaaataaaatcaaaggagtcaatctaatgaaaccccgaaaccatttatttaacgtcgctggagtcggtctgtacatctcttcagcactgtttccgcaatgctgtttaatgtagtaacgacaaagaattagatcactttgattactctgcgctttccgttttcatactcaggcttagagtagacaaagtctttcattctttgaataagctcaggtgacatatctgaatcataattcaaaaaggagctgatttttgactgagcacaaccgcattctttcgcaatttccgtttgagttaaccttcttttacgaatatctagccatagcttatgtctatcaatttccacttatagtcctccttccatcaataaatttttatttgaaataattatctaaaataaggggggctgatcactatgatcagcattctttgattatttaggaggaataaccaaaagactatagatgtccaaagttgaattaaacaatgtttgggtcgaaattgcatagtatggatttttgtgataaattataataacggaatcgtataaataattatccataaatcaatacttcttttttcttccctagaagaagattatagatatcactatacaactggaaaaacccttgtatatcaagggcttttccatcttcatttattttcttataatttaagcgtgacattttttatttttacgttcttttcgttttctcagcttatctaactctcttttcctctccttttgacacttatcacacctagttcccttttcgatttcccgctcacaatcaacacatttaatagctctgcgaatgttcttttttaaattccttacaatgttatacccaaaacaattgtagagagtatccttatgcttagagcatttagtcttgaatagatattcaaccaatatatctgttatgtaactgctgtctctaatactcagcaaggtttctctgatctcttttgttacatgccattctgcttcttgacgagaaacattttgttttttctgttgtttggccttccagtgcttattacgatcaagcatagtatagactgtcacaatcattgtatcttcaaccttttttttgctataatctttgagtaattcatcttttatttgcaggcaaattccctttgtacctaattccttttgctgttttgaatacaacttgtagagttcattaaatcgtgtcgatacctcttgatcaagctcaagattagtattcttattcttcagttttgtgtaatcaaatttacccgccagcctcttaaagttcaccctgttattcggtattttttcacccaaccgattaactacagaatcatttcttgatctgacgttctttcttttcttgtcttttgcgtaaataaagaagtgaggaactttcctgttataagtccctttcaggaaaccattaattctttgactaacatgttcaggacgggttggtttgtacaaggtctttgcataatcaatctcaaagttattttccatggtaagccatttgatcacgtctaaatcaaccttatcactattccacaccttggttatgttattgctatactcaccaatgtttacctcaaacgccagttccaagcttttatagatgatctcattattgatttcttggttttctgctgtcttcatttcataataaagaggaacaatatcatcatttttcatatttctttctgctatctcaacaaaagtgctgttgctaactaaaagtgctttatctccgtccacatcaaactgcagaagtcttgacaaggcatctttagtggacgtatacacgcctttcgtaatgaaccagtctttaagatcatcatttaacttgttgatcctaatgccatgctccctagacagatgaggaggccttaacacatctaatttttgctgattattaaaaagcttacagctaacctctccgtcatttagtaaaaccttcggatcagaatcaccgcaaaaccaataaccgcaagcagcatacaaatctggaataataaaagtataatgagagccttctagcaggatttttcctgcttttgcttccttcaccaaacgctttttattcttcttaataatctcctttgaatggttatcatttagcaactcaggataaatcaaatgggctttctgaaagttatttttatgggcattgctttcaacggctcctataacctcaagcattgattctttatctttgtaaagagtttggatcctcttcactgtgttttctgaaagcttttctaattcttcatctgtcgtgtcggttagtgtctggatcatttgataattaagttcactgtttttaaattcatcctcttcttcattcaacttggctgcctgacactcatacttcttaaatttggatttgtaatcatcccatgaatcataatgtttccagagcttaaactgactcttcgttaggataattttaataccgtctttaacaatatcccattccttgccgtatatatctttaattttggtcttccggcataatttagaatactcatcaaatggaaatgggactaacatccctttcataaaaggggctctaaacatgaatgcactctccgaaagctcagggagaatcattccacagccatccgtatgatttattggaatagacttgtactctcttttaatttcgtatgtttcatcgtttatgtaatcaacctcagtggacacatccgtctcaaaatcatttacaactatacactcatcaatattaaacccttcccataatgtactggcgctatttgataaggcaaggtaagcgatccatttgttaatgctcatgccgcccttagaattaattacctcttcactaagcccacacatcagagtgtttttcttcttcaggtacgtcttttctttgatgaatacacccttcttttgtctaatttgtcctgctgatgaagcatagtaaacgtatttttcattattaaaataatatccattctgaaccaagcttctaaaaacgttatggtaaaaggattcaactatcataatctcctcagtgatctgatcgtagtccaatccaagtgttcttattagcactgaatcaaataaagaaataaccctttgtgatctaacctctccatcttttgttttaagcgaatcacctctaagggttctcgtccctttaaaactttgctgctcttcaattaattcatctttcttttcgttaatccaacagttagtaatttttttaagacggttgattttcgctttgttgtatttgcaggccattagctcatcaatatcattcgaaagcctggactcactttcacctttttccttgatgtatgtaattagcgattgttccaattccttaaagcttctttcttcctcaaagagcttgccagttatatctaaatgattatcggttacatttgaatcattcattttcgccactttttttgccaacttctgcaagaactttttataaaggcgaagttgaagcaaatcctgatttaatttttcttctttatcattataaaaagcagatgaatctaaagagtaaacgaatactgatttagttaaattttcatttttcaataagtaatcctccaattgtttattccgaagaatgattaacttgttaatcatgatgagaagatggacaaagattactttgtacatctaggctcttcttaatttcaaatgatcaaatagtacttgggggatgctttaggttaataatccctcgctacgctccaaattattaaccttacagccaaccatcccccaaacccccttcagactggtgtttcacactcttttttctatgtaaaacttaaactcaaaaatttgacggtttaatgttcctattgtgtttcttgtttatactataggaagtttaaaccgttactttttatagaccacttggcaaagactgcgctatatcataggatagatcatcttgggcttccatctgttcaatttcatagcttatactctcagcgtcctcattaataaggaggtcaattagctttttgaagtcacgaatgtaattttcactgattctataattgttttctctaaatattgaatacgactttttgtgtctaccttccgcatttttcaataactttgaacaagctgtatgattcagtttctccttatagtcaacccgctcaatttctttcaacagaaaaccaatgagctcctcacactcattttcaatgtatttatcatttgcggtgatgtcataagcagcaaagtaatatttgagattgctacattcttttaatagagtctccgatctccgtttaaattcattccagtgccttgatactcgcacatgacttaattctttataaccaagctcatcaagcacttttttctcgcatgccataatcattttcttctcggccgaggacgctttccgcggtctgaatttccccttttcacaaacctttgtaataacgtcatacatgattagccttttctcaactaacttgtttagggcttgtacaaccgctttcttgaagctattgttgctactatcgtaaaaatctttcacaatttctgtatcagtgtttgcatatctagctagagactttcttttttcaaaacaatacttataattttgattaaccaagcttactgattttattaatcgtcctttacttatagatatgtttccattcttgctttgggcgagcatatccaatataaggagctgtagtagctcactgtaaacagtgttattcccctgccgttttattttttgaagaggctgctcaaagacttcctctataattatggaatgaccaactttactatatgtacagtatcgctctaattctttaaactgcgcctttcgactatcccctgaacgttttacttctagtccaagttcaccgcaaagcactttataattcttgaacgtttttcctgatgttaaaacctcaatttttataagcattctctcctttaaattaaatttaagtattctgatggtttactgttctcaatagctgtaacaatcggcgctctgttttcatttgtttcaagtttgcaccacagttgctctccattctccacatacctaccgttaaatttcgatatttcagcgtaagcttccggacaatatgaagaagatagcttgattaaaccggtgtcaaaacactctgtaaccgtcatttgatgaaaaccgttagttgagaatttatctaggttctcaagcataatccttatgtcattttttaaattttccgatgattttctatatgtaactttcttacaaaccccgtcacgcattatgtaaggcaaccccacaactactgaatcatatggctgcgggctaataatttctgctgtgtaaccatttgtgctaagtattgcattatgttttaggctataataaaccggcttgtcttcattgattcgcttaaagccattagctaatgctgctaaatcaattcttacgcttcttctagccgacatttaatcctccacttattttatttttatcctaaaaatatgtaatgagaaggagtgaacgattcgttcaccccttcaaatggatatgtaatgcttacgcaccacgtccaaaacctgctacatggaatgtttcttcccctgatgcgctgtgaattgtagtttgttgacccgcaacgaaaccaacagccaatgaagctacgattgtaagaccgataaatacttttttcatattatgttcacctcctttcaagtgatgcgaaattgatttcgcatttaaagggcaagtaaatccaaaatctgctcgtcctcacccatttcccttaatttatccaaaggtaagcgtatgctgtatagatcgccggatagcttaaagtgttttatagactcataaaagaatctcttatcttcataagctagtccctttagataaaaatgaatgccaaagtcattatgaatattcggttgctcctctaagttctccaatatttctttagcctgttgcaagttgtttttcttgatgtgatagtgtgcaatttcttggatatctgtaacttcatttgaatcagggtttagccaaaagttctcttgattccaatggttttccaagaaacaaaggcttctagttagctgtaatttcgccaaggggttattctcagtatgttttaaaccggccaggtaatattcctttgctttttcataatcatcaagcaaataagtattccccaaagttagatagctataagcgacaagcctatcaatattcgtcacattaatgccatatgagcaataaaaacgggcttgagtcatattattctgactgaatgccgaagcgcccaacaaagccatcagacggttataaaaggagcttttaatctgttcattgttttcaataaaatcaagatcaacaactgtcgacatttctgcaagatttgagtattcagccattctaaggtagtaatacaacgggattatgtaagtgaacacacgcatttcttgagacttgggatcaagcttcccaattgctttaagcgcctgatgtgcgtttatttcgcctctgtcttgcttacgtttgatctgatacattgctgcccattcacgttcaatcgaacagctactgttgattaattgatcaattaatgcgtcagtttgttcatactgttcattaatatctgacatttcaagacgtaccttttcatctacttttgatttcttagcttctctctcttttgctatcatccgaataaccccctgtggtgtgtcactaattcagaacaacagacagtggcgatgtcaccactaacccgaatctgaatataggatctcttttagttcatacagaacatatgatctcattatagttcatcctccagttttatggaacaagttatgtattgcgattatgtgttgcggtgttgctgttatgtaatatgaaactattagacttactgaccgttgaaccaacgcataaatccgttcgttggaattttgatacgtctaccgatctttactgtgtggaactttccacttttgcacagggcatatgcttgatcacgcccaatgcccagccagttctgcacatcttcaacgtcaagtgccggtttattcatgatgtcctcgtacatctggttcctcctttctaattcgggataatcccctcttgtttgggattaatttaagtatactcacattcaattaattagtcaataataaattattaattatctaataagttttgtaactgtttttaatcataattaattatgttatcattagctatattgttttatgatcttggaggtataagaaatgactgagaatgaacggattggaagaataataagaaacttcagattaagagagaaaatgtcctcagcagactttgctctattggttggggttagtcaagggactgtatccaacattgaaaatgggaagtttgggcaaagaaaaaacagtttgcaaacagtgaaaagaataattgagatatgcgaaattgatcttcctcctgacattgctgattttttagatattgaacctgaaccgacgaatgaaaatgatgatactgaaaaaattttggttgctagcagagacatgtgggatgtaactagttctacttcagtcgccattcaacttagaacatttgttaatggaaaagacttagatgacggatcagaaaaagaacgggattcccgtgaaaaatcttacatctatgaaagtgatgtcgtcgttaacactctaatggaatttatagaagagaataaaaaggaaatcagaaaaaaggttttggaaaatttaagagaaaaaagtttaagatttctcaagcaatacaaagacattgaggaggacgattaatggcatctattcacccttacaagacaagtaaagggaagcagaaatatcttgtagcctatgacatatatgatgagaatgggcagcgccaccagaaaaagaaaagaggattcgataagaaaaaagatgctaaagaattcattactgaagttgaatcagctattaataaagggatgtatattcagactccaaagataacggttaaagattatttagatagatggctcgaagtaaagtcgataaatatcggctctcagactgcaacactttataaaaattgtttaaagaactacatttacccctatttaggggatattcttttggccaatcttaaaacagagcacattaataattttattcatgctcttcacacaaaagatagaggcaaaggaaagattggatatgcttacaaaaccattaagagaagccatgaaattgtcagcacagcacttgactacggtgtagacaataagatgatcaaaaccaatgtagctaaaaaagcaatacttcctaaagaacccaaacgtaagagaatagatgtttgggacttagaacaagccaatcaattcttagaaacatctaaagaggatgaacaaaacagatatcacttggcttatgctatagctattatctgtggaatgcgtcagggagaaatactggggcttacctggaaagatgtcgacctagaagacaaccttctttatgttgaacaaacattgtcccatgatggtaaagaaattcttgatgatactaagactaagaaaagtagacgaacaattgaattcagtgaatcattggcagatcaattcagacaacaaaaaaagatcattgagagcgaaaaagaaaagttcggggacgattaccaagatcaagacttagtaatatgcacagagcttggtaatccaataaacgcacgaaacgttcttaggaagcaagctaagctgatgaagaaggctggagtaccaaagataacctttcatgatctaagacacgtacacgcctccttaatgctttattttggacacgatattaaagagatatccgaaagacttggacatgcaaaatcgagctttacttatgatacctatgtacacatcatgtctaaaactaagaaaaaacttatagataacctgcagcgatcaataaaactgtgacctcctatgatgggggttatttttttcgttttcttttcttaaaatgagacaccctgttgccacttttaaaactcaaacacaaatgttgccgttttgttgccaatagagattagagcaaataaaaagccactcttgaaattctcaagaatggctttagatcaagctttattagtatggagccaagggggctcgaacccctgacctctacgctgccagcgtagcgctctcccagctgagctatggccccgtgctgtaacgtcatgttttattatagacgagtcttctttgaatttcaagcagaaaattcagtttgctcatattttcctgagacgcttttcgaatataaaaagaagaccctccggggggcctcttcgtttatcgcacgagcatgattaaaatgatgccgaggatgacacggtaaatggcgaacgggacaagcttaattcggttaatgagccgaagaaaaaacttgacgactaagagggcgacgacaaaggcgcagataaagccgacaagaaaaaacggaatcatgtcataagaaaggctgctccagtatttcaccagcttcagaaggcttgcgcccgccatgatcggaatggccataataaatgtgaagtctgcggctgcccggtgattcaagccgacaatgacacctccggcaatcgttgagcctgagcgggaaaatccgggccataaggcgagacactggaataatccgacacagaaagcctgtttgtaggtgattctgtctaccgtatcgatcgtttctttccttttattgatccagtccgctataagcataagcacggctccggcaattaatccgtaagcgaccgttctgacggagaataaatagcggtcaatgaaatcctcaaataaaaagccgagcaccgccgccggaacaagaccgacggcgatttgcgcgatggtcagcctgtatcccttctgctgatcgcgcgcgacgttttttttgaggccgagtaaatgtaatatccgatctttaaacacaatggctaccgccagaatcgaaccgagctgaatcaccactttgaaggaattggcggcttccggattcatcaggcttccggatttcagccagatgtcatccgctatgatcatatgtcccgtggaagaaaccggcgcgtactccgtcagcccttccacgattcccaaaacggctgctgtgaacatctcccatagtgtcatcccattcttcccttcattcatcatttacaaaagagaagctctcctctgaaggaaagcctgtcttataataaatatcatgtccgttccgattttatgacttcgatacagcatcatttttttcttcttcatataaatgcgaacgcattttgaaccaatcaaacagatgggtcgtgaccactttgatgaccgcataccccgggatggctaaaataatgccgacaaccccgaacagctttccggcggttaaaagaacaaagatgatggtaatcgggtgaatgtgaagatttttccccatgatctgcggcgaaattaatttcccttccacgagctggacaacggtccatacaatcgcaagcttcagcagcataaggggcgaagtgaccaacgcgataataatcgccggcgtgatggcaatggtcggccctaaatacggaacaacgctcgtacaagcggcaatgaccgcaagcagtgacgcataatcaagtccgataatcagatagccgataaataataaaaacccgatgcagaagctgacgatgacctgtcctctgatataggaacttaatctgtggttcatttcactaagcatcgtatacgtttgttctttcagacgggtgggcacaaactttaagatataaatcggcagttttttgccgtctttcagcaaatagaacagaataaacggcacggtcacaattgaaataatcacttccgtcagcgcgccgataaaattcccgactccggtaaatgtgctgtttgcaattgtcgccgcctgcgccgatactttattagcaagatcggaaatgttgatattcatcgtcttttgcgcctgatttacaaaatcgcttccgatcaggcttttcgtctgatcttcaacgatgtccacatatttcggcagattgtcgatcaggctcatgatctgttcctttaaaaacggaataattgaaacgaccgtaatcgtaatcagccctataataatgaggtaaaggagcaggatggaatagactcttttcactcttattttttccaatatatctacgatcggattaagcagataataaacaattcctgtcaaaatgacggggagcgcaatcgttttgagcaggacgataataggtgtgaaaataaatgatgtcttcataaagacaaggatattgagaccgatgagcagcaatacaagcaaaaacaagacaaatttattgtctaagaaaaactgtttaaatctgccgccccatgtttgcaatgtttccactattgttcctccatcatatgtattttacttaaattgtacactatcgttcctgtaatgaaaaataataaccggtctctatgggaatttttcctatccctttagccggcagccttttttccatttatgtttctcagaaaaaaagctataatgtaagccaatacatagaaggagcgatagcaatgattcgatttgcaacagtcggaacgaattggattacagaacgatttctggaggcggcttctgctattgatgattttcaattaacggcggtttattccagaactgaggaacgcgcggcggaattcgccggcaaacacggcgctgctcattatttcaccagcctgaaagaaatggcggaaagcaaagcttatgacgcggtgtatctcgccagcccgaatgcatttcacaaagagcaggcggtcctttttatggaacacggcaagcatgtactgtgcgaaaaaccgtttgcgtctaacgcaagggaaacggatgaaatgattcacgcagccaaaacgaacggcgttctcttgatggaagccatgaaaacaacgttcctgccgaacttcagcatgcttcaaaaccacttacataaaatcggacccgtcaggagattcacggcaagctactgccaatattcatcacgatatgatgcatataagaacggtacggtgctaaacgcgtttaagcctgaattatcgaacggttcgttaatggacatcggcgtgtactgcatttatccggcagtcgtcctgttcggcaaaccgaaaaacgtcattgcgaccggtcataaactagcatccggcgttgacggcgaaggcacggtcattctgtcatacgacggatttgaagcggtgctgatgcattcgaaaatctcaaattcgtttgccccggcggaaattcagggtgaagacggcacgatcgttctggacagcattcacggaccggaacgggcggagatccgctatcgtgacggccggacggaagacatttcagtccctgatctgaaaccgtcgatgtactacgaaacggctgaattcatcaatcttcttcgaaacggacagcgggagtcttccgaaaatacatttgaacgttctttcattacggcaagcattatggaagaagcgagaaaacaaatcggaattgtctttcccgccgatcaaaactaaaaacatccgcccggattcgggcggatgttttttatttggacgctaacaggtcagcaaacgcttttgcatactgcggaaggtcgggcgggcggcggcttgatacaatgtggccgtcagttacgacagcttcatccagccactgtgcccctgcatttgtcatgtcgtctttgatgccgggcgtgctcgttactttttttcctgcgagaattccggcagatatgagcacccagcccgcatggcagatctggccgatcggctttttctgctcgttcatcgtacggatgatgtccaaaacttcgggatatcttcgcagtttgtcaggagcccagccgccgggcacgagcacggcatcatactcctggataatcaggctcttaaaatcgtaatccgccgtcgcgggcacgccgtattttcctttgtatgaacggcccgcttcttctcctattaaatgaacgatcgcgccttcctctctcagccggtagacgggataccaaagctctaagtcttcaaaatcgtcactgacaagcgctatgacttttttgccttctaatctcatcactgccactcccttcttttatactagtgtatcgctttttttaaatgaggaaaagaaacagctcgctacagctgttcttcgtcttcagactgaatcgtaaatttccgtgtgacctgctgcagttcttcggccatatgcgcaagcgtttcggcggatgaactgatttcttccatggaggccagctgctcttcagctgaggcggcgatgtcttgaatgccggcggacccttctttggcgactgaggtaatgtcctccaccgcgtttgtcacattttgcgacccggctgcaagcttctcaagcgttccgttcatatgctgcaaggcgcctgaaatctgagtcgtcatttctgagattttcttgaagctttcggccgtttgatccgtaatatcgaggccttccttcacatcttgattcaccgcttggaatacggaaagcgatgtggcgatttctttgacgatttcctgaatcagcgtttcgatttccttcgcggagccggctgattgtacggcaagctttctcacttcttccgcaacgacggagaagccccgcccgtattcgcctgctctggccgcttcaatggcagcgtttaaggcaagcagatttgtttgatcggcaatgccgttaatgacgttgagaatgctcttaatgtcgtgcgacttcgtttccagcccttttacgaccgcttccgcctgctgtacggaacgatcaattgttttcatctggccgaccgttttcgccactaattcttctccgcttccggcggtttcagaggtttggatggcggattcagtgatttccgccgatacattcgccgtctcggcaatgcccgcattcatttgggaaaggtgatcagcactttcttccaatttctcgctttgtgattcgtttccgtttgagaattgttcaatcgccagtgtaatatgctctgtcgccttgcttgtctgtccggcggatgccgtcagctcttcggatgaagaagcgacatgttcgacggatgactggatgacgccgatgacagaccggagtgacgctgacatctcattgaagctttggctgagctgcccgaattcatttttcgacttgatgtcaatgacttccgttaaatcgccgtcactgattttagctgatgtcgaaacaagttttttgagcggttttgcaatcgagcgaatgataaaaaagattaaaaccccgccgacgataagagaaaccgccaggatgatcagcgccattttcatgacaggcgaggctgcgtcatggatctcactgacaaaaaatgtgccggcgattttccagcccgtcagtttgtttgtcgtgaaggccattttcttctgctgtccttcaaacatgtattcaaacgatccgctcgatttggaaaacacttctttcgtccactctccggagccttccgttcccgcttttatagtcggatgcgcgatgtattttttatctcccgttgtaatgaaggcaaaacctttatgaccgatctggacgcgttcggaagcgttcagcaggtcgccaagattaatatcaagcgccacaacgcctgatccgtcttttgtctgctgggcaatcgtaacaaccgtctgtccggttgcagcgtctttatagggctcggtaaacaccggctgtccgcttttttcaagtgctttggtataccactcgcgcgtgagcggattataatcggacggcatatcaacggacggatatttcacgaacgctttgtcgcgagacgcggcgtaaattgacgcgacatcgtcatttacggtgacatactgcttcattttgtcgagcagtaccgatttattttttgtgttcagtttttccttagtgattgattcgctgtagtagtcaatcgctttcagcttgccttcgagcatgttttccagcacgctgttcagttcgctgacatttccctgggcgctgtgggtcagttcgctttctaatgtactccccgccgtttggtagctgaagtaggcgagtatgccgaccggaagtaccaatacggctaaaaatgccgcgatcagcggcttgctgatggatggctgtttgatccaatgtatcagttgtttcattttttcagtctccttctttgaaaagctaaatctaatatcgtcagataggacaaaagatttattaaaaaaactaaaaaaaacacccaaacagcacatttgggtgttctatgacctattaatctattttaaatcgtttcgtcatatcacgtaattcttccgccatttgggataacgtttccgaagacgaactgatttcttccattgaagccagctgttcttcggcggaggccgcaatatcctgaatgctggcggagctttcttttgcgatggacgcgatttgctcagaagctcctgaaatctgctgagagcctgctgtcagctgttctaccgtcgcattcatattttgaatttctccggcgatctggttcgtcatttcagaaatccgtttgaagctcgtttcggtctgattcgtaatatccagtccgctctccacctctttgttgacggattggaacatgccgagagatgtattgatttcattgacgatttctataattaagctttcaatttctttcgctgaatcggcagactggacggcaagctttctcacttcttcggcaacgactgagaagccccggccgtattcacccgcacgcgcggcttcaattgccgcgttcagcgcaagaaggtttgtctgatcagcgattccgttaatgacacggagaatgtttgtaatgtcttttgattttgtttcaagtccgcgcaccacttgttcagcttctttcactgaccggtcaatgacgttcatttggccgaccgtctggtggacgagctttccgcctgaattggcgacttccgctgatgtgacggaggattcggtaatgacggcagatgctttcgccatatctttaagcccgctgttcatttggtaaatatgttccgccgcgctttcaatgttttcactttggctttcatttccgttagaaaattgttcgatcgccagtgtgatatgttcggttgccttgcttgtctgctccgctgaagccgtcagctcctctgaggaagatgcgacgttattcacggaatcctggatggcatggatgagagacctgagcgaagcggccatattgttaaagcttttgccaagctcgcctaattcatcttttgactgaatctcgatcgtttctgttaagtcgccttcactgatctgtttcgatgatgtcacaagctgcttgagcggttttgtgattgaacggataatcagcaccatcacgatggttccgatcacaatcgctaatacgagaacgagcagggacagatgaaggatcggcagggccgcttcatgaatttcgtccagatacatcgttccggtaatcttccagcctgtcagcccgtttgtatcataagccattttcttttcctggccgtcgtatttgtattgaaaatcaccttttttgctggtgaacagctgttcagcccactccccgtttaatactgtgcctgacgtgcggttcgggtgggcgaccacttttttgtctttcgtcaggataaaagcgtagcctgattttccgatgttcactttctttgtcgttttcagaagctcatcgattttcatattgatggcgacgactcctgagccgtctttcgtctgctgaacgaccgtcacgaccatcgtattggtggaagccgtgcggtaaggatctgttacaacaactttccccttattttccacggcctttttataccagtctctttcaagcggattatatcctttaggcatctgcagatccggataccgtgtgaaatgtccttccgtgtcactcgtataaatggattccacgtctttattgatcttcatgtactctgtgaatttatcggtaatttgcgattggtttttcggcttgtaccgatcctttgtgagccagtcgctgaaatatgccgttccgtcttccttttggctgatgcttgtgttgatcatatcgttaatctgctgcacattatctagtgcgcttcccatcatctgcctgtcaagcgtgcttaccgccgattgataggcgataaaagccagcgttgaaataggaagaatgagaatggccaaaaaagaaatgagcagttttcttgtaagcgatctctgcttgatgatttgcacaatttttttcatctgctatatctcctcttgcgtgtttacccttcatatcggcaattatgggtaaatatacacatccaaaaagaagaaatataacgaaacatactttttacctatcgtaaaattagtcttttagacttaattaagagtttatcttaaaacgctttgtcagttcgcgtaattcttccgccattttttccagcgtgacggcggaggaactgatctcctccatggacgcaagctgctcttcagctgaagccgcgatgtcctgaatgccggccgcgctttgtctggagacggccgcgatatcctctgaagcgtttgatacttcctgagatccggcagaaagctgttccacggttgcattcatattttgcagttcaccggcaatctgatttgttttaacggaaatgtcccggaagcttttttccgtttcgtccgttaactgaagtccgcttttcacctcgtgattgacggattccagcattccgagcgaagtatgaatttctttgacgatttcatgaattaaggattcgatttctttcgctgaatcggcggattggacggcaagctttctcacttcttcggcaacgactgaaaaaccgcgtccgtattctcccgctcttgccgcttcaatggctgcatttaaagcaaggagattcgtttgatcggcaatgccgttaatgacgcgcaaaatgctggtgatgtcctgcgatttgagttcaagcccttgtacgacttgctccgctttacttacggattggtcaatggcgcccatctggccggctgttttcttgacaagccgctcaccggcgccggatatctccgccgattcaattgacgtttccgtcaccacggctgccgcttccgccagatcactgagcccgtctttcatctcattcacttgggctgtcgctttatcaatactctcactttggtcttccgttccattagaaaactgttcaatcgcaagggtgatatgttccgttgctttgctcgtctgctcagccgaagccgtcagctcctctgaggaagaagcgacatgttcaacagagtcctgaattccctgaataagcgaacggagtgaatctgtcatatgattaaaacttttaccgagcacgcccagctcatcttgagagctgacatcaatggtttccgtcagatctccgctgctgattttttcagctgaagctacgagacgttttaacggttttgtaattgagcggatgacaaaataaatgaaaatcatccctgcggcaatggctatcgccaatatgataacggccagagtcagaaccggtcttgccgcatccttgatttcatccacggacatggttccgctgatcttccagcctgtcgcttcattggtcacgtacgccatttttttcgctttcccgttcagcgtatattcaaagtcgcctttttgcccgctgaataatgtatcaacccattttcccgataccgccgagccggctttttcatcactgtaggcaacggcttttttatttttgctgaggataaaggcgtatccttcttttccgatgttcacttcttttgtcatcttgatgagatcgtcgatttttatatcaatggcgacgacgcctgatccgtcttgcgccgcgcgggccatggtgacgaccatctttttgtttgagatggactcataagggtctgtgatgatggtttggcctttattctccatggcttcctgataccagcttctttcaagcggattgaaatcggccggcatatcggcatgcggataacgggtaaacgttccttccttgctgcttgaaaatacggcggatgctttatcattgctttcaataaactgcttgaacctttcttgcatttccgtttggtttttttctttaaatttagcgcttgtcgcccattcgctgaaatatgctgagctttttgtaaacattccgatccggtcatcaatcatattgtttaagatttgcacatttccttcggcgctttccatcatttgcttttcaacggatgaagccgccgaacggtaggcgccggcagccaatactgctaccggaatgattaagatcagtaaaaatgaaatgatcagttttttggctattgattttctgacgattttttttgctgtttttttcaattttgtaaacctctttcaatcatttactgtttatatcggccgactccctttttattacattgaaaattaagtcataaatgaaaaatagttctatgtactccctttgcatgcaagactttttatttaattatccggctgtcactataaaaaaggacgccttccctccggaaagcgtccttttttactagttgattttaaattgtttcgttaattcccgcagttcttcggccatttgcgccaaagtatcggcggatgtgctgatttcttccattgatgcaagctgttcttctgcggatgcggcaatatcctgaatgcttgctgcgctttccctagatacgtccgcaatatccgtcactgcggctgaaacgtgctgggagctgtctgacagctgttcaaccgtgccgttcatcgattgaagcttctcggcgatatcgtttgtcatgccgaagatattctggaagctttctttcgtgcggtccgtcacggcaagtcctgattgaacttcttcattaacggatgtgaacatgtgaagtgatgtattaatctcagccgtgatttcctgaatgagtttttcaatctctttggcagaaccggcggattggacggcaagcttgcgcacttcttcggctaccactgagaagccccgcccgtattcacccgctcttgccgcttcaatggctgcatttaaagcaagcaggtttgtctgatcggcaatgccgttgatgactcttaaaatatgagtgatgtcttttgatttggcctcaaggccttttacaaccgcttccgcctgctggaccgattgattgatgagattcatctgcccgacggtttgctgcacatattcttccccggtgccggcagcttccttcgattgtttagatgcttccgtaatggatgatgatgtgcgggaaacggcggcgagtccgtcatttatatgattcagcttggctgagcttgaatcgactttttcgctttgctcttcgtttccgtttgaaaactgctcaatggccattgtaatatgttccgtcgctttgcttgtctgcgaagctgaagcggtcagctcctccgatgacgcggccacattgtcgacagagttttggatcgcgctgatcagtccgcgcagagattctcccatttcattaaagctcgcgccgagttcgcccaattcatctttcgagcggatatcaatggtttcagtcaagtctccgccgctgatttgtttagaagagcggacaagccgtttcagcggtgacgtaatggatctgacaatcaacagaattaaaattcccccgatgataatggatgctgcaaggacgagcattcccatcgtcagcaccggttgtgaggcgtctttaatttcgttgagctccatgctcccttctattttccatccggtcagtttatttgtcgtaaacgccatttttttattttgatcatcgagcttgtatgaaataatgccgctgtctttgctgtatacctcattcagccacggggttgaaactttatcgcccggtttgtggtctttatgcgcgacataggttttatttttggatgtgataaacacgaatcctttttgcccgattttgattccctgcatctgcttcagcagctggtcaatcgtaatatccatggccactacgcctgttccgtcctgcatctgctttgccacggtaatgaccatgctgccgtcgcttgccgcggtgtaagggtcggtgacaacgagcgtgccgccggccttcacagcgtctttataccaagtgcgtgttctcggatcgtaatcggccggagtattctccttcggcgcctgtgcgtagctgccgtcttccgtacctccgtaaatgcgggctacgtccttatgaatagacgtgtattgcccgaacttttcttcaagagcagacatgtttttctttgagaaggatgacccttttaacgtttcactgaaaaattcaatcgcctttgcttttgcgccgatatcatttgtaatggttgtgttaaaagattcgatgttatttttcgcgttgcctgaaatctgatcatccagcgaattgctcgccgtatggtatgaactgaattctaacacgagaatcggtatgattaagatcacgataaatgaaatgattaatttacgtgaaatcgatgcctttgtgcaccaattaatgaattttttcatattaagctgctccctcaagtgtgataccttatatatcggctcagtcttcacattttgttaacatttcctccttttttatgacttgattttcattgcccaagcttcctgcatatcttataaaaaaagataggggggcgcgcagatgattatcatatccggccaagtgcttcggcctcaggacatcgcgaactggcagacggaagaaagccttgttccgtatataaatgaactgctcaattctcccgtacaattcgattacgggtcgattgctgaactgatgttcgaggtgcggctgcgccgccatattgcggaagccgcaagagaactgcacggatcaggtgtgaaatttgcaactttcgccaaaacatacggaaatacggcttattggagagtgacgccggaaggagccttggagctgaagtacagaatccccgcttcaaaagcgattcgggacattattgaaaacggggcgttttacgcatttgaatgcgctaccgccattgttgtgatttattatctggccgtcttaaagacaatcggtgaagaacggtttaaccggcgtttccgggatatcactttgtatgactggcactatgagcatctgccgatctacacggaaaccggcagccactttttacggggagattgtttatattttaaaaatcctgattttaatcctgcaaaggctcagtggcggggagagaatgtcattgtgatggggaatgatcaatatttcgcccacggtctcgggattctgaccgctgaacaaatcatccagagattgaattctttaagaaaaaaaaatgccgtgcagccggcttatctgcttaaccaggcaacaaggcttgatgcacccgcgctttatcagatcatgcattaaaacaatcccatcgtctgtcattgtgacgatgggatgcggaatgcttttcttttccggtaaaaagccgtcgtgccgagcgcttgatttgcagcccattcaaacttctctaaatcatggcgggtgacggctctgtcccgtcggctccatttaatggcgcggacaaagtaataccctttaatcggcgccatggtgactttggaatgcggaaaatcttcaaagacaaactcaatagtccctctttttttgtaggacatttgaagaatcttcatcatccatcacctcacgatttctgaattatgattcgcacaatctgtccaaaacggttttcacgtctgtcggcccttcaagtttcgcggcggactggccggcccataaagacatatactccgcgtctcctgattgagccgcgtgcccgcgcatcggctttgtcagcgtattatgcagcggataaggcagcgtatttccctcgtcagcctcatatgttttcatgaactgattcacgattccccgcgcctgttttcccgaaaacagggtggtcagccgcgtgtcggctccttttgattcggcaatggctttttgatatgccggtgaggcgctgctttcttcacaaaggagaaacggtgttcctacttgaacgccgtccgcacccaaacatcgggccgcctgcacgccgcggcggtcaaaaatgccgcctgccgcaatcaccgggatattcagcgcgtctttagcctgcggaatcagcgccataaggccgagagccggttctcctttaaccggcagaaacgacccgcgatgtccgccggcttcaattccctgaagaataacggcgtccatcccccgttcttcaaaagccttcgcttcctccggcgttgtcgccgtgccgaaaaggaaacaaccgcttttcttcagcttttccgccgtttcttccggcggaaggccgaaggtgaatgaacacgctttgactccgtaacggatcagaagctccgctttttcctcgaaatcattccattcttctttcagatcagagaacggattggcgtcttttgccctcgggatgcgggctttccatttttcaaccagttccgcctcaggcatctgcctttcttccgggacgaaaagatttacttgaaaggagcggtccgtcagctctttcatctcgataagctgtttttcaagggcttgcgggctgacgtatcctgaagcgaggcttccgagcgccccttcatttgataccgccgaagccagacgcggcgtgaccagcccgccggccatcggcgcctgaatgacgggctttgttaatgataatgcactcatccactcactcatttgtgttttcctccgattcagcctgtattttgatataacatgttctgtttcgcggaccgtcaaattcgcaaaaataaacgccctgccatgttccgagtatcaggcggccgtcttctatgatgacatgctgggaggcgccggttgtactcgctttcatatgtgccgccgtatttccctccatatgccggtccagttcgtgctcccacggatatatttcatcaaaccttctgagcatatccctcttcacatccggatcggcattttcatttatggtaatgccggcggttgtatggggacagtatatgagcgccaaaccgtttttcacgcctgttttgcggagaaacgcttcagcttcatgtgtgatgtcgatcatttcatcccgtctgtttgtttgaatctgcaattttttcagcatatagatgcctcctttctttttctcttcctttcccatattcgtttctgtatttgtcttttcctgtcggatcgcgatgataaacgcagatcacaaaaaacttcagcctcgggactgaagtttttcaccatatatatacgcgggcctcataaggctttaaaagaaaggatgtcacatgccgatgcggtggtgtttccatgcttgcgagcacgagcgtatcggagtcaagcggataacctggatgcttgtataaagcgggggtccgggacagatttgtgatgatcagggcggtttttgttccgttttttcttagataggcataaatctgccggtcattcggaagcagcaattcatatgtgccgctgatcaatacgccgtgctcttttctgagggcgagcagccgtctgtagaaatggtatacggatgtttcatcctgcatttgtgatgcagcattcagccatgtgtggttcggattcactccgagccacggagaagcatcagaaaacccgccgttcgcctcaccgctccattgcatcggtgtccgtgaattatcccggcccttcttccagatgatcttcatcactttttcatgcggaacgccgcgggacgtctctttttcatacagatatttcattgcggcgtcatcataatcttctatggatggaaacgaaacattggtcatcccgagctcctgcccctggtaaataaacggcgtgcctttcatcagcatatacatcgcggcgagtgccttggcgctttctgtcaaaaaccgttcgtcaccccataccgagacggaacggggctgatcgtggttctccataaataacgcgttccagccctttccttcaagactgttctgccagccggacaagacgcgcttaagcgccggaatggagatgctttgatcatcttccgtatcccagaggccgagatgttcaaattgaaaaatcatttgaaagacgccgtgttcctcaccggcccaatcagccgcctcccaagccgccactccgttcgcctcgccgaccgtcatgatcggatagcgcgaaaatgtttcccgtttcagctcttttaagagatccattatgccttccccattcatatggtacgggaaagacgggacgtacgggagaccgtccggattcggcatgtcagggagcccttcttttttcttaatgtgagaaatggcatccacccggaagccgtctatgcctttatcaagccaccagcggaccatctcataaacggactgcctcatcgcttcgttttcccaatttaaatcaggctgttttttgtcaaacaggtgcaggtaatactggccggtctcttgatcatattcccacgctgatccgccgaaaatgctttcccaattgttcggctctttgccgttttttccgtctctccagatgtaccagtcccgtttttcggaatctttcgccgagcgtgattcgataaaccaaggatgctcatcgcttgtatggttgatgacgaggtctataatcagcttcatgccgagcgcatggacatccgcaaggagccggtcaaaatcctccatcgtcccgaattcgcatgcaatttgtttataattccgaacatcgtagccgttgtccgcacccggcgagtcaaaaacgggacaaagccagatcacatccgcccccaactcttttatgtaatgaagctttgctctgatgccgttcatgtcgccgattccgtccccgttcgaatccataaagcttcggggataaatttgatagacggccgccgttttccaccaatccgttttcataccgacactcctttctttacatcatatgaaggagcgggacgaagaagcatttttcccataaaaaaagcctcattgcaaaagcaggaggctcagaaatcagtttttttaatttcaacgaagcggatatgatggtcttccgcttccagcaccttaaattcacacccttcggcatgaaacacatcaccatttttcagctccattttttgtgttaagagccagccggcaatcgtgtcaatgtcttcattttcgatggcgatatcaaggagatcattcacctcttctataagcgccttgccgtccatcacataatggtgttcgccttttttgacgatgtggggcatttcatcctggtcatattcatcacggatttccccgacgatttcctccaatatgtcttcgacggtcacaagtcccgccgtgccgccgtattcgtcaacgagaatcgccatatgaatccgctccttctgcatgcggatcaaaagctcctgaacggggatgctttcaatgactctgatgaccggacgcataatttcttttaattcaatggagcggccgagaaaatacgccttaaataaatccttattgttaataatgccgagaatgtgatctttgtcttccttaataaccggatatcgcgtataccgttcgttgatgatcaaatgtatggcttcatcaactgactgttcaagcgagatggcggcgatttcggtgcgcggcaccatgatttctctggcgacccggttatcgaattcaaatattttattgacgtaacggaattcagattgattgatttgaccttttttatagctttcggacaaaatcagccgcaattcctcttcactgaccacgacctcatgttctttcaccgaatgaaaaccgaacagcttgaccaaaaatccggctgaaccgtttaacagcttaataaacggatacatcactttataaaacagaatgagcggtttcgccgtccacagactgacggcttcggctttttgaatggatatcgttttcggcgcaagctctccgatgacgacgtgcagatacgtgacggcgataaacgccgcaataaacgtgacgacgtgcgtaatggatgacggcattccgatcaggctgaaaacaggatgaagaagccgctgaatcgtcggttcaccgagccagccgagtccgagcgccgtaatcgtaatgccaagctggcacgctgataaatattcatcgagatttgaaatcaccctgtgcgccgcgagcgcccggctgtctccggtttcaaccagctccgcgatttttgaaccgcggattttgacaatcgcaaattccgcagcgacaaagatggccgttaatccgattaacagcataatgagaatcagttttaatataagcaaaaaaacccctaccgcaaacggtaaggggccacctccttcgtgttaattctcatcacgaccatttaagaaaatcatcacaaaacgaagcagctcgaataatgaaacgagcgccgcagccacatacgtcagcgcggcggcgttcagcactttattcacgccgtgttcttcactgttgcgaatgaatccttccgacacgataatccgcttcgccctcgcgctggcattaaactcgacaggcagtgtgacaagctggaaaaaaacagcggccgaaaacaaaataatgccgagtccgattaagttcaagctgcccaggagcatcccgcccaagaaaagcagaggggcaaccccggaggcaaaattgacgaccggaaaaattttgtgcctcagcacaagcgcgccgtatgattcctgatgctgcaaagcatgtccgacttcatgggaagcgacggaaatggcggaaatggagcggccgtaatataccggctcagataaacgcaccacccgctccgtcgggtcgtaatggtctgttaaagtgcctcttaccggttctaccggcacatcatataaaccgttaatatcaagaatccgtcttgccgtttcggcccccgtccgctgactggaagcttctacgtctgagtatttctgaaaattgcttttcactttaaattgtgcccaaaacgacaatcccaatgcagcaattgttaaaaagataaacagcatattatcctcttcctttttctcttatatcgtacgatttgcttatatattattttaatgattgtccgctttcctgtacagaaatccgcttcttttttctgacaggaatcaaacctccgagcatgatgaggatacacccggccaatccgatgtaaaacggaaacgtgcctgcggtctcttttgcaaaaacaagccatgaaaatccgccggacatatgattgtatccattcaaatcgaaaataagcaatacggccgccgaagcgagcagctgcgctccggccagcaccgccagcagtttttgaatgactgtcatttgactcaccctttttcgatccgctttctttatcatatgaaaaaatgagggtgaatatgttttcggcgatttttgaaagacatcaaacgaactgggacatactgtataaaaaaagatacaggtgtgatcgacatgaaagtgacaaatggcgagaaagaacagctgagcaatgcgatagacagaatgaacgaagggcttgacgccttcatccagctctataatgaagcagaaaacgatgaacctctcatacagtttgaagatgagacggccgatttaatcagacatgcgcgtgactcatacggccaggaacagctggacgaaaaactaaacaccattattaagcagattttatccatctctctgtcgaaagaagagccgggcgaatgaaatcgaaccgtttatttatttcctggctgagatggccgttatatgttcggatcggactgatcattatcgcgttgattttattgttcggccaactcatttacatgcttgaaccgaagcaattcacgtctgtgtttgaaggggtttggtgggcggttattacggtggccacggtcggctacggcgattacgttccccagacgccgctcgggcagattgccggcatggtgcttgtattaagcggagcgagttttgtgaccgcctatttcgccacgctttcttcagccgtgttcagcaaacagcaccgctatgtcgaaggcaaggtcgcctttaaaggcaaggggcacgtcatccttatcggatggaatgagaagtcgcatatgctgcttaaagaactgcagcacatcgcgccgtcaaaaactgtcgtcctgattgatgattcattaagggaagggccgcttattgaaaacgtccatttcatccgcggacatgccgctgatgacagtacgctcaataaggcgaatattacggaagccgataccgtcattttgacagcggaccagcagaaaaatgaatccgaagctgatatgctgtcggtattaacgcttctcgccatcaaagggctgcatccgtccgtttattgtatcgtggaaattttaacggaacggtatgtcaaaaacgccgagcgcgcaggagccaataagattctgtgcacatcacgcctgtcgagccgggtgatgtttgagcattaccgggtcaagctgcagcttgccaaaccgcaaacgctgtcagatctgacgctggagaaaaaggtgcgcatcattcccgtccccgaggaattaaagggttcatcttatcatgactgtgcgctctattatctcaaacggaataccacgatcatcggcatacaaaaagaagaggggccgatgctgacccctcccctgtcataccaggtgctcgatactgatctgtttttggctctttaatgcagcaggacgtcttccagctctttcacaagcgagatgccgatatctgtatatgagcggtcaattgccgcatcccgccgtttcggctcggagaattggttgaataatgactcaaaaacaccgccgcctgcgtgatcatccgtttcctgctgataaacgtgcctcagcaaaaagggtgtgccgattgtaacggcggcccctcgttcatccaggtgtcccttatttgcttcaacagggatgcggagaaataaatagccgtcctgatcggaaattttgtaatcaaagaacccgcggtcatactcccaaccgcctccgatggtataaccgatcggcttcagcacctgttccagttcgcggagtaaaaacgattgcccttcaagtgaagatggaatgctgatcatgtgcatatgctcctttttgtctttagcgtccccgctctgcggcatcttcatacggcgcccgggaagaatcgggagcggcagacagacgccggaaagagataacggcgcattcaatcagaacatacgtcacaattgcggagagaacggcttccgttgaaatatagaaaacgacggcatagagacagcacttcgtgatcagcgtatgcatccggccaatcttcagtttcagccggaccatgtccgtaaacaagccgagagggaaagcgaaaaacaggatggtttgtaagagggattcaggagacagttttagtgccgaatagacaatagcggcggaacagacggaaatgacggcatgcttacataagagtcgtatcattcatcatcacacctttcacggtttaaaaaaggctgacccgtcatgctgagggccagcccttttttttatttttcaaggcgtttttcaagctctgcttttttctcttcaaagcccggtttgccgagaagcgcgaacatattcaccttataggcttcaacacccggctgatcaaacgggttgactccgagcagataaccgctcatcgccaccgctttttcaaagaaatagacgagatatccaaatgtatatgcattaagctccggaatattgacaattaagttcggcacttttccgtctgtatgggcaagcatcgtgccttcgaacgcttttttgttgacgaaatcgaccgttttgccggccaagtaatttaagccgtcgagatcattttccgcctcttcaattgtcagctcatgcttcggtttttcaacgtttaatacagtttcaaacagatcgcgtctgccttcctgcacgtattgaccgagagagtgaaggtctgttgagaagttagcggaagaaggatagatgcctttttcatcttttccttcactttcgccgaagagctgcttccaccattccgcaaagtattgcagcgcaggctcatagttgataagcatttcaatggttctgcctttattatacagaacgttgcggacgacggcgtattggtaagccgcgttctcttctaattccgagctggagaagtctttgcttgcatcaagagcgcctttcatcatttcatcgatatcagccccgcttaccgcaatcggcagaaggcctaccgcagtcagaacggagaaacgtccgccgacatcatcaggaataacgaatgattcgaagccttcttcattagaaagcgtttttaaagcgccgcgctctttatctgtcgtcgcgtaaatccgcgctttcgcttcttcttttccgtatttttcttcaagaagtttgcggaaaatccggaaagcgattgcaggttccgtcgtcgtgcctgatttagaaatgacattgatagagaaatcagcgtcttccaaaagatccataacatctttcatataagttgagctgatattgttgccgataaagataacttgagggtttttgcgcttgtctttcggcagaacgttatagaaagaatgattgagcgcttcaatcgccgcgcgggcgcctaagtatgaaccgccgatacccacgacgagaagcacgtctgaatctgatttgattttttcagcgctttttttaatgcgcgcgaattcttctttatcgtagttttcagggaggtccacccatcctaaaaagtcgcttccggcgcctgttttttcatggatattatggtgtgccgtttttacgaaatcacgtgcgtatgtaagttcatgttcattgaaaaaaggtaacgctcttgagtaatcaaagcgtacatgcgtcatttgcttgtccctccatcacggtgaattgttttctctttcactttatatgaactcacccgctaaatcaagtcatgaagaaggcatgatgaatacgggatttgcgctaaagatgcgttcattttttatacaatatcccggattcaatatggttatatttgtaatgatcgtgagagggataacgaatcgaatgttggtgatccaggaacgtatcacctttactttggagcaggatgacatccatcgccaatcccgatgggccggttctttttatatagtactcctcttgagaggctgccacgaagggatattaaggcataaatgtacatttttaaaaatagtgtctatatttggggtaacgtgttaagatgaaagtgattttaaaccgggaggtgattttatgactaaaaccattggtcttatttgtggaagtttacgaaaaaactcgtataatcgagcaattgctcaatcactgattgacttcgataatgcggctcaatttcgctgggttgaaatagacagtcttcctttttttaacgaagatttagaaattgccggagcaccagactccgtaacatcctttagagctgatatacaagacgttgacggcgtcatcattgtaagtccagagtacaattccggaattccgggggtattaaaaaatgcattggactgggcatcgagaccgcggacctcttctgttttaaacagaaaaccggttggcttaatcggagcaacccccggagggttcggtaccgcctttggccaaacgcaaatgagagaagtactcgaagctatgcaagtcaatgttttgccctttcaaaaaatgctgatttcgcaagtccatgagaaaattgattccgctcaaaacatacttacggatgaacaaacaaaacgttatcttcaacactatttacaacagttcatccattggattgatcatgctccggttcccgttccaaattaattgaaggatcatctccctcacgaaaagtcacctcagaaataactttctatctatacagcatatgaatagatttaccgttttcaattcacaaacttacttgccttaattcaaggaggatgataaaatgtctgatctttattcccgtctttcaaaagatgatgctgccgtgcttttagttgaccatcaaaccggccttatttccggtctcgtgcgtgactatggcgttgatgaatttaagaacaatgtattggctctcggtgatacggctaaattctttgatttaccggttattttaacaacgagttttgaaaatggacccaacggaccgctcatgcaagaactcgttgatctctttcctgatgcgccgaaaatagcccgtcccggacaaattaatgcatgggacaatgaagattttgttaaagccattgaagcgactggcaaaaaacagctgattatcgcgggggtggtaacagacgtctgcgttgcttttcctgcgctttctgccattaaagcaggctacgaagtgtttgttgtgacagatgcttcggggacgtttaataagcaagtagcagatgcatcattaacgcgtatggctcatggcggcgcgcagcttatgaactggttcagcgtagcgtgcgagcttcagcgtgattggcgcaacgatgttgaaggttttggcgcattaatctccagtcatcttcccggttatcaaaacttaatgggaagctatatgggggcgcagcgggatcttagtacacaaaatgcataaaaggagcgctgattgaatcagcgccccttttttaaattcgcggctcttcatgatttagattttgtgtaaatagatgatcggcaatcgcaaagttaattgatccttttctgctaaatgtacagaaacagggagtcaaatccgcatcatgtgagatttccatagttgtctcatggcaaggggtgtttcacttgctcttgatgcactaatgaagggactcccaaacggttgcatctgcatcttgaaaatctatttcatcttcaccccggccgggaatgtatcttacagtgacgcctttaagatggcaagtacgtcatctttgttcagtttttggaaattgccgaatccgccgtattccatttcttttgcggcgatgtctgcgatcagctcaagcttgtcttcaccgatgtcataatccgcaaggcgggacggtgcgccgaggcttgtccagaacgcggacaatttatcgatcccttcaagcgcaatttctttatccgttttgccttcagtatcaatgtcaaacatgttgagcatcaggtttttaaaacggtctacatttgtatccagcgtgtatctcatccagttcgggaacagaatcgcaagtcctcccgcgtgagggatgtcataaaccgctgatacggcgtgctccatcgtatgggaagcccaatcgccgaaatagcccatttgcagcgtgccgtttaatgcgatcgtacccgcgtataaaatcgtttcacggtgcttatagttctcaaggtcttccaaaagtttcggcgctgtttcaattaccgtctgaaggaccgcaaaacacattctgtcctgaagcggcgtgttttcaacattgtggaagtattgttcaaatacgtggctcatcatatccaccatgccgtatacggtttggttttccggaacgctgaaagtattctcaggatctaaaatggagaaacgcggatgagtgacattgctgccccatacgaatttttcgtttgtttcccaatttgtgataacggaatcagggttcatttcagagcctgtcgccgcaagcgtcagcaccgtgccgaacgggagcgcgtcctgcgccgttacttttttgctgtaaatgtcccatgcgtcgccgttatatttcgcaccggccgcaatcgcttttgtacagtcgatgacacttccgccgccgactgcgagaaggaaatcaatctcatgctttctgcacagctcaattcctttatttaccgtttccagacgcgggttcggttcaacgcccgcaagctcatgaacggctgcgccttcttcttttaagatgcctgttacttggtcatacaggccgttacgcttaatgctgccgcctccgtatacaagcagcacgtttttcccgtattgcttcagctcttttttcaattggtcgatttgaccttttccgaaaatcagtttcgtcggattgtagtacgtaaagttctccatttatcatgacctccaaaaaaatcgtaagggaattactataacacagaaaaaaaggagctgccaatccggccgccccctttatgttattacaatgatgctttcagtatcgcaagcacgtcttctttctgcagtgacttgaactgtccgaatgctccgtttgccatcgctttatctgcaatcgtatccagcttctcatcagaaatatcataatcagcgagtctgttcggagcaccgaggctcgtccagaaatcagacagcctgctgattccttcaagtgcgatctcttcatctgatttgcctgtctcgtcaatatcgaagacacggacggcaagctgtttaaagcgggccggattttctttgagcacatgtctcatccagttcgggaacagaatcgctaaacctccggcgtgcggtatatcgtaaaccgctgataccgcatgctcgatgttgtgtgtggcccaatcccctcttgcgcccattgacagcattccgtttaatgcgatcgtgcctgtatataaaatcgtctcacgaagctcgtagttctccagatcattgatcagcttcggcgctgtttcaatcaccgtgcgcagaagcgattcacacatccggtcctgatacggcgtgtttgacgtgtggtggaaatattgttcaaacacatggctcatcatatcgaccatgccgtaaatggtgtggtctttcggaacggtaaatgtgtttaccggatcgagaatagagaatttagggtaaacgagcgggctcccccatccgtatttctcttgtgtctcccagtttgtgatgactgatccggagttcatctctgaaccggttgccgcaagtgtcagcactgttccgaaaggcagcgcttctttcggctggtgttttttcgtgacgatatcccacgcgtcgccgtcatatttagcgcccgccgcgatggctttcgtgcagtcaatgacacttccgccgccgacggccaataagaaatcgatgctgttttctttacagagcgcaacacctttgttcaccgttgagacacgcggattcggctctacgcctgccaattcatgtacggtaactcccgcttttttcagaagttcggttacttgatcataaagaccgctgcgcttaatgctgcctcctccgtatacgagcagcacgttttttccgtacggtttgatttcttcaggaagtttttcaacctctccctttccgaaaatcaatttggtcggattccaatatgtaaagttttgcatgacatctcctcctttggatttatattatgcagaaagatgacgttcaatgtaaagcaatccgcttttttgacggcgcatcacatggtttacagacatcgaattccagggaaaggcacttgtacagcctgagacagtgtgtgattttacacggcggagaatgtagtatgcatagattctttgctttgtcacaatctataactgtttcacgaattcatagaggaggttgtttacatgagtgttattcagcgtatctgtctcgtattaacgattatcggcgctattaactggggactgatcgggtttttccaatttgatttagtagcagccatcttcggcggccaaggatcagctctgtcgcggattatttacggccttgtcggcatcgccggtctgatcaatctcggcctgctgtttaagccgaacgaagaaacatcccgcgaggaagcggcaaatccggaagtcagataaacataaaaaaagcaccgaacatacatatccggtgctttttttaatgattattttttgataaggtctttgcggttggactgttcaatccactcttcaagcttatctttcaatgtgttgaaaccttgcggagcagatgtttcttcagaagcttgagccgctttcggttttcttggtttgctttcttttctttcaggcgccgcttgagtcgcacggatagaaaggctgattttgcctttttcttcgtcaaccgcaagtacttttacttgtacttcgtcgccgatagaaaggtgttcgttaatgtcttttacgaaaccgtgagtgacttcagaaatgtgaacaagtccttgagtttcttcatctaatgcaacaaacgcaccatacgcttgtaatcctgttactttaccagtgtaaacactgcccacttcaaattttgctgccattcataacaactcctaagttaaattaaatacagattatacgcaatttaaaattatatcatacaagtttgtttttcgcaaagagaacttttttacatcatcatgtttaagcacagataaaggagggtatactatgattacgaaggctttctagtattccccccttttatttggatgcgaaccgggttcgtatctttttttatgcccttttttcaacaaaccgtttgattctgacgagcgcttcctgaatctgctcaatggatgtcgcataggaacatctgatgtagccttcgccgctcgggccgaatacattccccggaacgacggctactttttcttcaatgagcagctgttccgcgaattcttctgaactcatgccggtcgactgaatggaaggaaaggcgtaaaatgctccgccggggtggtggcagccgagtccgatttcgttcaatgtctccacaatcaggtttcggcgtctccgatagcttttcttcattctttcgacgtcttcctggccgtttttcagcccttcaagcgccgcgtactgagccatggaaggcgcgcacatcatcgcgtgctgatgaattttgagcatggcatccctgatcacgggaggcgccgccgtaaatccgagtctccatcccgtcatggcaaatgctttggagaagccggaaataagaatcgtgcgttccttcatgccgcggatggcccccatgctcatgaatggctcatcatacgtcagctcggcataaatttcatcggcaagcacgatcaagtcgtgtttttcagcgaaagcagcgatggattcaagctcttctttcgaatagacggaacctgtcggatttgacggcgagcatagaagcagcgcttttgttttgtccgtcagggccgcttcaaaatcggcggctgatgctttgaaaccttttgcagcgacagtctgaatcggcaccggtttcgcccccgtcaaggtcacgagtgattcatatgcgacaaaacacggttcgggaattaacatttcctctccaggattcataatggcgcggacagcgagatcaagcgcctggcttgctcctaccgtaacgatcagttcactgtcaggcgaataactcaggccgaaccgctgatctaagtagcggctgatttcttctctcagttcataaagacccgcatttgccgtataagccgtataaccctgttctaaagaaagaatactcgcttccctcacgttccaggccgtcacgaagtcaggctctcccactcccagtgaaatgacgccttccatcgtggcggccagatcaaagaacttgcggatgcctgacggtttaatctgctgcacgtagtcagataaataagaagtcttcgtttccatttacggagacaccacgattcttttgtcatcgtctccgctttcaaagactttgccgtcatgcttatattttttcaggatgaagtgcgttgtcgtggaaacgacagactcaagggtggacaatttttcagacacgaagcttgccacgtctgacatcgtgttgccgcgaataacgacggataagtcatacacccctgacatcaggtacactgattcaacttcctggaatctgtatatccgctcagcgacttcatcaaagccgacatttcgtttcggagtgacttttacgtcaatcatcgccgtgacgccttccaaaccgtcgactttgcgccagtcgatcatcgccgcataatcaatgatgactttttctttttcaagcttttcaatgatgcttttgacttcttcggcgggaatgtttgccattttcgcaatcgtttccgcatcaacgcggctgttttcgtctaaaatttctaatatttctgtttctttttcggtcagcttcatacgtttcacacctttgcattatcaaaaatcttcatgacattatatcacgattttcgacaaatgctaagaaaaacccgaaagaaaccagagctaaaatctgacaatcaaaaaagcctttacattacaacaaagaaaggacggcgaaggctctcatggaagctgtttcaccgattaaacgggccgcgatagacggagttgagctgtattacgagcattatgaaaatcccggcagacagacactcgtctgtgtacacggttttttatcttcggcattcagcttcagaaaactgatcccgctgctcagaaaccattatgatattatcgccgttgacctgcctcctttcgggcaatcggaaaagtcacggacattcgtatatacttacgcaaacctcgccaagcttctgatcggacttctcgaaaagctcggtatcagccgggccgcactcatcggccattcgatgggcggccagatttccttatccgcgtctcttctcagacccgagcttttttctaaaatcgtcctgctgtgcagctcggggtatttaaagcgctcgcacccgtcgattatattcgggacgcatctcccttgttttgacctgtatcttaagtattggctttcaaaagacggcgtgctgaacaacctgttaaatgtcgttcacgaccggacgcttatcgatcaggaaatgattgacggttacgaaaaaccatttacagaccgccagattttcaaagcgatgacaaggtttatcagacatagggagggtgatttagagcccgaggatttgaagaaagtgcaaaaccccgctcttttaatctggggagaagaagaccgtgtcgttccggtctcagtcggaaaacggcttcatgacgacctgccggattccattctgtattcactcaaggatacggggcacctcgtacccgaagagcgcccggagtttgtttcggagcggatttttgaatttattcaataaaaaaaccggcggaaccgccggtttttaaggggtgcaggagctgctttcttttatgaacagaagctgctcggcggccttttggcagccttcgatcggaagctttcgctcaaatgaagcttcaaagatatcctgaatggctgctgccagcttgtcggcacggtcttcactgtagacggcctgaacgatatcgacggcttctgtctcataaaaatcttctccatatttaaacgggtcccacttggcaatgattttcatcatttccatgaccgcttggctttcttccattttcatcaccgcttataataaagtttgcaattctattttatcatagatacgctgtgcaaaataatgatactacaggagtgacatacatgaactttgatcttcgagaaaaccgtcttggcacacaatcggtgaaatgggacaaggcggaagcgttattcggcgtatcggatgcacttccgatgtgggttgccgatatggatttccgcgctcccgaagcggtcactgacgccttaaaagcccgccttgaccacggcatattcggttatacgtctcctgacgaaaacacaagagaagccgtcgcttcatggcttgagacgcggcacggctaccggcccgatcccgcaagcatcgcgttcagtcccggtgttgtcacggcaatcagcatggccgtacaagcctttaccgaaccgggcgatccggtgttgattcaatcaccggtgtatacgcctttttatcagatgatcaaggaaaacaaacggcaggttttacataacccgttacgggaagaaaacggcgtctactgtatggattttgaggatcttgagaaaaagctgaacgattctgaggtcaagctgatgattctttgtaatccccacaatccgtccggcagagcgtggagccgggatgagcttatgaagctcggatcgctgtgcgccgcccataacgtcaccgtcgtttctgacgagatacattccgacttgatgctgtacggaaagccgcatacgcctttcgcttctctgtctgaggagtttgcgcggatttccgttacttgtgtcgcgccgagcaagacgtttaatattgccggcattcaggcatccgccattatcattcccgatcggtataagcgggcgaaattctccgccgcattgcatcagaacggaatttccagcctcaacacatttgcggttgcagcaatcgaagcggcctatacaaagggaggcccttggcttgacgcgttgattccttacattgaagggaatatgaaattggctgaggactttttaagaaaagaattgccgaaagtccgcatgatgaagcctgacgcttcctatttgatctggatggatttcagcgaatacggattttcggatgccgagctcaaagaaagaatgctcaaaaaagggaaaatcatattagagccgggaacaaaatacggaccgggcggcgaaggatttatgagacttaatgtcggctgttcagccgccgccgtaaaagaagggcttgagagaatgaaagcagcgttcgcttagcagcggaaagaacgcctttatcagatgagataagggcgttcgctttagagaaatatatacttttttttccggtaaagatgttataatagattcatatttacataggaaaggatttcgcataaatggagattgtaaaggattacctgcttcacttctcttttattttattccctatttttctttatcaagtcttctggctcagtaagcccgatttgcttgtgccgagagcgaaccgcctgctggtcgccgtatttgcagcgtcatcttccttattatgtacggcttttcccatccaggagcttcattccgtccgttacggtttgcagctgattcccattatcgtctgcctgctttattccggtaccgccgcaggacttgccgcaggggcggcatccgttttttttcagctcatatggtttgaaccttccgctctttttttcttatccttaattccttttttaatcatcatccctatccagctccaaacgaaatggccttttttttcaaagcggaagaaactgcttttcgctcttctcatcggctgcactgaaaccgccttattaaccgcatctgtcttcatctattccgcgaccaatattttcaattttcaaaatctatcttccgtttattatgaggcggcagtatccgttttttttcaagtcagcgcccttttgctgtgcatttatttgattgagatcattgatgagaatgcgtccatgcgggcaaggctgattcactcagaaaaaatggccgtcgtcagcgagcttgcggcaagcgtcgcccatgaagtccgcaatccgcttacggtcgtcagaggttttgtgcagctgctgttcagcggcgagcagcttcaggacaaatcccactccggatatcagaaacttgtgctgtccgaactcgaccgggctcagacgatcattacgaattatctcgatatggcgaagcaggatgactatgaaaaagaaaagtttgatatttctctgctcgtaaaggaaacaggttccttaatggagtcttatgccaattttaaatcggtgaccgtgactgttcaaagcgagcctgatttatatgtgttcggcgatgtaaaaaaactgaaacaggccttcattaatctgattaaaaacagtattgaagccgtgccctctgaaaacggccgaatcgaggtctctgtccaaaaacaggaagagatgattctcattcagattacggataacggaatcggcatgtccgatgaagaactgcagaaactcggcaagccgtattatacgctgaaaacgaacggcaccgggctcgggcttaccgtgacattctcgattattcagcatcatgaaggctccgtctgtttcaccagcggcgagcactcgggcacaacggcctcagtcaggcttccggcagctgttcactagccaaccgcgttgatcttttatagaataactagagagaggtgaacgctatgaatacgtttgacatcggcacaatcgtaaaagggttttataaaacaggagcatacataggggaagtgacagacgtcaggcccaatcactatttagtgaaaattaaagccgttctgacgcatcccgctcaaggagatcttcatcatccgaagcaggcggatgttccgttttttcatgaaagaagagcgcttgcattcggggaacagacaaacataccgcatcagatggtcaaaccgtttgatggcgaggtgcctgattatacggcttccttacaagcggcgtctgcccggctgaaagatcagcttacagcggacggctcagaatgggcggaacgttcgctcgacaacttggccgcgttagagcgtgactattttaaaagaacttgacccagtcggcatgattgggtttttttatgtggcccggcgaaacagttcagtcagatcgacgcgatcaccgatcgtcggaggtttcggtttttcaagatattgtttatcccgctcgacaagcttgaataatttgtatgtcgtccgcgcatcatccagcgctttatgatgcgtgcccgtccctttatcgccatactcttctgccgctttccaaaggccggtcaatgttctgtcgccgaagaagtttttgtattcaagggacagatcccgaagttctcctttgaacggaaaagggatgtggttaaacatgcaattttgctttaacactttcatatccatattgccccaggtgacgatcgtgcagtttttatcaggatcaagctcatttaatttgcggatgaattcattaaacgtgattccgccgtccacgtctttttgggtgatgttcagaaaggttttgcatcgtttcgtcagcttcggaaattttttcggtttgatataactcgaaaacgtttcagtcacttcatcattcactgtcttgacaatccccgcttcaataatctcgggaaagaaattttgcgggctgtattttccgtcaggcattgtaaattcaaaatcaataatgagcagactgcgctgatccactttttttacacctgcctttcctccgttcaaaaatgatattttatgatagtatatcagtttcccctctgaaactttcttcattttctaaaaataatgaattttcctatatccgcatcgaaaatacaaataccggattcattcctatatactaatgattagatacacgaaaagtaaagaaggtgatgttatttctgtccgtaagaagaacttcgtcgtcatttggattacaaatttctttatttccgccagcatgaccatgattgttccgtttctttcgttatatatcgaaacgatcagcccccattcgggcgggtatgtgcagagatggagcgggtatgtgttcggcgtcacgtttttaatggcgtttgtgatttccccgttctggggcagattcggcgataagcgcggctacaaaaatattctcttgattacaggaaccggcattgccgtcagcattttattgatggggtttgtgacatccgtttatcagctgtttgtcctgcggctgcttatgggtctagtaacaggctttgttccgacgtcgcttgccatgatttcggcgcagacgccgaaagagactgccgggaagacgctcggcacgctgcagatgggtcaggtgtcaggcactttattcggaccgatgctgggcgggatgctcgctgacagcttcgggtttacgtacacgttttttattacgtcttttgttattttcgcatccgtgcttctcgttttatttcaggtcaatgagcagccgctcggcgagaaacaaaacaaacggaaaacctattccagaaaacaggtgctctcttatatttttcaccagcccgcgctttgggcgatgatggtgcttactatgatcgtgcagaccggcaatttcagcattcagccgctgctcgctttatatgtcaatgagctgcacggacctgttaatttagcttttttctccggaatggcgttttcagcgaccggactcggaagcttattgcttgcccgaaaatggggggacttcggcgaccgcttcggccacagccggattttaatcgtgcttttgattgcctcagcggtgtttttcattccgcaggcgctcgcctcctccctctccattctgttagtcttcagatttctgttcggcatggtcatgggcggcacgctcccctgcattacggccgcaatccgcgtcagggcgccgggcagcatccagggagaggtgctcggctataacgtcagctttcgttttctcggaaatgtgctcggccctctgctcggaggtgcggtctcaagcggtttttccatttcggctgctttctacgtcaccgcctttctctttttaataggcgcggggctcttatggatggcgggacatctgcaaaaggatacagcgtcaaatgcgggctgaccggcagcgatcacgatttcttctaaatttaaccttctcgtattcttaaaagaatgatacgatatggctagaaatcaggagaaaagagagtgaccatggtacgtaaaataatcggatggattttgctgctcggcattatcccgttgtgtgcatttacagttattgcttccggcaaagaggtaaaacaaatcaagccttttgatcaggtgctcgataaacatattgatttaaaagcgatcaacctggttcaaaacagttacatgtatgacagggacggaagccttgtttctgagattgtcagcgatcatgagaaccgcgtgatcgtgccctttaataaaataccgaatgaggtaaaacaactgtttttaacctctgaagaccgtcatttttatgagcataaagggtttgactttatggggatggtcagggcggccgcctccaatttcaaagatcataaaattgatcagggcgccagcaccatcacccagcagctggcaaggaatgtgtatttaagccatgaacgcaccttcagccgaaaactgacggagctggcctattcctatcagcttgagaaaaaatacagcaaagatgagattttagaaggctacttaaatacgatttattttaataacggcgtatacggtgtcggttcggcggcacaattttatttcagcaagccgctgaaatctctcactttgggagaaatggcctttatctgcgccatccctaataaccctacattatatgatcctctcaagcattttgattatacgaaaaaacgacaagtcagattgcttaacggattaaaaaaagcaggcgttatatccgggaaacagctgaaaaaagccgaaaaggaaaagatcaagcttgatataaacgaaaaaacaaataaatatcctgactatgtttcctatgtaaatgatgaattcacacagcttgtttcatcatccgaaggctatgacaaacgtcttgaaaaagcttccggaaaggcgaaacaaaaaatacagagtgagctttcagacagagtcagcacattgttaaaagacggcgtgaagatttatacggcgctgaatccgtatatgcaaaaccaggtcgtcgcccaagtgaatcaaaatctgccgtatgcaggcgtccaaggcggagcggccgtgattaatcatcagacacatcagattatcgcgctttcaggcgggaaagattaccataaatatgatttcaaccgtgcctatcaggcatacagacagcccggttcatccattaagccgctgcttgattacggaccttatattgaaaagacaggcgcaacgccacacagcaagattgacgcaagcaaattctgcagtgcggattactgtccgcaaaactacaataaccgcacgtacggtacggtcacgctggaaacggcgtttaaatactcgtacaacacaccggccatcagaatcatggaccgcgtcggcgtcaataaggcgttcagctaccttgaaccgtttcatttcgcgaagctggtcagcgcggattaccgtctgcctgcggcgcttggcggttttacaaacggcatgacgccgcttgaaatgaccaatgcgtacaccacgttcggcaacaacggcgtttatacgccgagtcacgcgattacaaaagtgactgatttaaaaggaaaaacgatattaaaatggaaagatgagccgacgcaggtattcagcgtgcggaccaacatgcagatcaaagaaatgatgaaagccgtcgtcaaaagcggaacaggaaaaaaagcgaactttaaagctccgtacgtcggcggaaaatcaggaacgtcaaatgactatcacgatatgtggtttgtcggcctgacggacgcttatacgatgggggtatgggtcggcaaggatacaccgtcaagcgtcgaatatcttcatgacgcaagccctcagctttcgatctggaaaaacacgctgcaggcagcttattaaagataacggaggggatccgctttgaaaccagctcagcttccggaccgtgtacttttgtttgacggcgtctgcaacttatgcagcggcgccgttcaattcatcattaaacgcgatccggccggcaaaatctcatttgcatcattgcaatcagataccgcccgggagcttttggcatcagaaggacttccgacagaacaatttgacagcatgatttttatcgaaaacgggcggatatacaaaaaatccgcagccgtgttaaaggtttcccgtcatctccgcggagcctggcggctgtcagcggtttttttcgcagtgccccgccccctcagggacagagcctattctttcatcgcccggcgccgttacaaatggttcggaaaaagggaagcatgcatgctcccctcccctgagatcaaaaacagatttctgtcttaacaaaaatggctagcttacacaggtaagctagccattatgctattataaagcttgataaagatgtacaaaataccgataacaaaagtaaaccaaaacagaatctcaagcaatataaaaccgatcagcgaaacgatcgaaagtgtcgaatagattctgtacaccatgaaaatcaaataaacgagcgtaacaacggcaaataacgccgcaatccaaaaaccattctgcacgagcgcaaaggaaagaattcctccgcctacataaattaaagagcctaatctgatttttttcagattgtccccttcaggatcatttgtgaaaaacaaaagagacagctctgtcactgtgtttgcaatcagcttcaaagccgaaaaaagcataaaatacacaagggcgaacgctgcaaaaagcgccagtctgatccctttctcagagaaataatccagcatcccctgatacatgccgagcgtctgaagtatcttcatgacataaagcgaggtagaaatggataatgacgaactaaaaagcagaatcgcaacgagcggaaaataacccgtccaataagtatttttcatataaaaagtccctttctgtaatctacctcacttattatggaggacttaaaacacattgacaagataaaaaataccatttttcctcacttttacgaaataagggcctgatcttcacaaaccggctttttcggagtaaagtagaacgcgggaatgataaacgtaaggaaggctgttatgaaaaaaacattaaaattgcaaacccgattaacgatattcgtctgtattgtcgtccttatcgcactttgtatcacctttttcacgatcagcgtccaaacagcagaccgcgtgaaagaagaagaacggacgaccgcgctgcgcaccgcaaagctggtcgcggaaacaccgagtgtcgcgcgggcattgcaaacaagaaaagggctgaaagagctccgggattatacattagacgtccagcatacgacaggaaccgaatttgtcgtggtgatggatatgaacagcatccgcctcacccaccccgacgcaaataaaatcgggaagaaattcaccggcggagacgaacagccggcgatgcacggacatatcaaaacgagcacatcagcgggaactctcggaaaatccatgagagccttcgtaccgatctatggaaaagataaaaaacaagtgggcgtcgtttcggtcggaatttcgcttaacaaaatacaggatgtcgtcagccacagtttgagaccgctttatttcatcatctgcgtaagtatttttgtcggcgtcatcggagccgtcattgtcgcccgcaccgtcaaaaacattatgtacggtcttgagccttatgagatcgccaccctcctcgaagagcggagcgccatgctcgaatcaacgaaggaaggcatcctggcggttgacgcgcgtggaaaaatcaagctcgccaatgcggaagcgaaacggctttttattaaaatgggtattccgactaatccggtcgatcaagatgtgaacgatattctcccgaaaagccggctgaaacaagtgattgaaacgaaaaaaccgcttcaggacagggatatccgcattaacgggcttgagctggtctttaatgaggttccgattcatctgaaaggacaaaccgtcggagcgatcgccacgttcagggacaaaacggaggtcaaacatttagcagaacagctgtccggtgttaaaatgtatgcaaacgcattaagagcccagtctcatgaattcatgaataagcttcatgttattttagggcttgtccagttaaaagaatacgatgatctcggcacttacattaaagacattgccattcagcagaagacggaaacaagcgagattataagtgatgtcaaaagtccggttctcgcagggtttcttctaggaaaacaaagctacatacgcgaacagggcgctgatctggacattcagctcggcagcctgatcccgaatgcggcggatccggccgtcatccatgagctcattacgattatcggaaacctgttaaacaacgcgctcgacgcggtggcgcagatgccgaaaaaaaacattacgtgctcgatgcggtttcaggatcgccagcttgatatagagattacggacacgggagccggaatgtctgcggcagaccaagcccgtatttttgaacaaggttattccacgaaagggacaaaccgggggttcggcctctatttcacccagcaggcaacagaaaatttaaaaggccatatgattgtgacaagtgaaaagaatgaaggaacgactttcagtcttcgcattccgtatgaaccgaaggaggaaaatgatgattaatgtactcatagttgaagacgaccccatggtgggtgaattaaataaacgctatctcagccagattgaaggatttcagctgaaagggatcgcatcatcctttcaaagcgcgctgcacgtgctgagcgagcatcatatcgatcttatccttcttgacatttacatgccgggaaaaaacgggcttgagctattaacggaaatccgcaaacaaaatgaatcggttgatgtcatcgtcatttcggccgcaagcgagctggacgtcatcaaaaaaacgcttcggtacggcgccgtcgattatttaatcaaaccatttgaatttgaccgctttcaaaccgctctttccgactacagacgcaagcagaaagtttatcaatcacacagaagcatgacacagaaagaattggatgccgagctttttcaaaagaaagaagcggcggaaaaggttcaccttccgaagggattgacaaaaagcacgcttaaactcatctgggcgagcattgagtctttcggtgacggctcttttaccacagaagatctcgccaagcatactgaaatctcgcaagtctccatccggaaataccttaaatttctggaagacatacaagtgctgaatgtagaaatggcgtacggcacgatcggcagacccgtcttccaatatcatatcaacaccggcaatgtcagcagcatcaaacaatatttataatgtcaaaaagcgccgtccagctgtgaacggtgcttttttactgtcatatcccgtgacaaaaggcttgagattccttttttgtatgctatataaggataatgacccggctgatcctcctctgttttatccaaatgaggaagccgattcataaaatttatattttttaaaaaataagcaaatttctatttatttatggcgggtaaaatgataaattatgattggttagcagatcttttcagataagtcataagtcccgaacacggaagagacagccgctcaaggcgggaaaaagagagacgtctcatcattattatcagaaagttttttcgattctgcatccggtacggggactcaagtctgaattgaacagcacagccatattttacaggggggttatatctttgaaaaaacgcaaaatcggaatggcgatggcgctcatcgcggcggccggaaccatattaagcgcatgcggttcaagtgacaaagcaaacggctccggcagcaaaaactttaccgtcggcatggtaacggacatcggcggtgtcgatgacaaatcatttaaccagtccgcctgggaaggtattcaggcattcggaaaagacaacgggcttacaaaaggcaaaagcggttttgactatcttcaatcaaaatcagatgcagattatacaacgaacttaaataaattagcgcgggaacactttgacctgatttacggcgtcgggtatctgatgcaggattccatcagcgaaatcgccgatcagcgcaaagacacaaattttgcgattattgacgccgttgtcaaaaaagacaacgtggcgagccttacatttaaagagcaggaaggttcattcctcgtgggagcggctgctgcgctatcgagcaaaacgggaaaagtcggattcgtgggcggaatggagtctgaattgatcaaaaaattcgaaatcggcttccgcgcgggtgtacaagccgcaaatccgaaagcgaccgtcgaagtgaaatatgcgggcggatttgacaaagccgatgtcggtaaggcgacggctgaaagcatgtacaaatcaggcgttgacgtcatttatcacgcggccggcgcaacgggaacgggcgtcttcacagaagcgaaaaatctgaaaaaagaagatccgaagcggaacgtatgggtcataggagttgataaagaccagtacgcggaaggtcaagtcaaaggcacaaaagacaatgtcactctcacatcaatggtcaaaaaagtggatacagccgtggaggacttaacgaaaaaagcgagtgacggcaaattcccgggcggcaaaacattaacatacggtttggcgcaagatgcagtcggcatctcagatcacaaggagaacctttctgacgacgtcatcaaagcaacagacgattggaagaagaaaatcgcggacggactcgagatcccttcaactgaaaaagaattgaaatccttcaaggctgagtaagaaccaggggataaggagacttccgtgcttatcccctctcttttatgaaaagagcggtgaaggaaaagctgcatctcttgcagcttttcttttgccaagctctttctcatcaaagtatttctgaaaaggagcgtcaaatcggtggattatatcattgaaatgcttaatatacgcaaggagtttcccggaatcgtcgccaatgatgacgtcacgcttcaagtgaaaaaaggcgaaatacacgcccttctcggtgaaaacggcgccggaaaatcgacactcatgaacgttttattcggcctgtatcagccggaaaaaggcgagatccgggtgcggggcgaacgcgtacacatcaacagcccgaacaaagccaacgatctcggcatcgggatggtgcaccagcattttatgcttgtggatacctttaccgtctcagaaaatatcattctcggcaaagagccgaaaacattcggccggattgacagacagcgcgccgcccgggacgtgcgcgatatttccgaccgttacggcctgcacattgatcctgaagccaaagttgccgatatttccgtcggtatgcagcagcgggcggaaatattaaagaccctctaccggggcgccgacattctcatttttgacgagccgaccgcggtgctgactccgcacgaaattcaagaactgattcagattatgaaaaatcttgtcaatgaaggaaaatcaatcatcctcatcacccacaaattaaaagagattatggaagtctgcgatcgtgtcaccatcatccggaaaggaaaaggcattacaacactcgatgtcgcacatacggatcaagatgaactggcaagccttatggtcggacgcgaagtgtcattcaagacggataaacaagcggccgatccgaaacaagaagtgctttcactttctgatgtaacggttaaggacgcgcgcggcgttgaggcggtcaaacagctctccctctcagtcagagccggtgaaatcgtcggcattgcgggcgttgacggaaacggccagtctgaattaattgaagccattacaggtctcagaaaaacaaatgccggcacgatcacgttaaacggcaaacagctgcaaaacatgccgcccaggaaagtcactgaagccggcatcgggcatattccgcaggacaggcataaacacgggctcgtccttgattttccgatcggagaaaatatcgtgctgcaaagttattaccaaaagccctactcttctttcggcatattaaataaacacacgatttatgacaaagcgcgaagcctgattgaagaatacgacgtcagaacacctgatgaatatacgcctgcgcgcgctctctccggggggaatcagcaaaaggccattatcggccgggaagtggacagaaatccggatcttttaattgcggcccagccgacgcggggactcgatgtcggcgcgattgaattcgtccataaaaagatcattgagcagcgtgacgccggtaaagcggtgcttctgttatcttttgaacttgatgaaataatgaatctcagcgatcgcatcgccgtcatctttgaaggcagcatcatcgcaaacgtcaatccgcttgaaacaaacgagcaggagctcggacttttaatggcgggaagtaagcaaatggaggcggggaaaacacatgattaatcgactttctcatctggctgtgccgctgattgcgatcatccttggattagctgcgggtgcggtcatcatgctcgccagcggctacaatgtcgtaagcgggtattcggctctttggagcggcattttcggtgaagtgtattacatcggggaatcgatccggcagattacgccatatattttgtccggattggccgtggcattcgcatttcggaccggcctgtttaatatcggggttgaaggacagctccttgtcggctggaccgccgcggtgtgggtcggcgcttcctttgacgcccccgcttacatccaccttccgctttcgttattggcggctgcggctgcgggcggcatttggggcctgattcccggatttttaaaagcccgtttttttgtccacgaagtgattgtcacgatcatgatgaattatatcgctcttcatttaaccaattatctcatttccgatgtcatgacggaccaccgggacaaaacagacaaaattcatgaaagcgcgtcgctccgctcgccgtttttagagcagctgacagattactcccgccttcactggggcattctgatcgctctgtttgcggcagtcctcatgtggtttatcattcataaaacaaaaagcggatttgaattccgggctgtcggctttaaccagcacgccgcacaatacgccggaatgagcgtcagaaaaaatatgatgtacgccatgatgatttccggcgccttcgcggggcttgccggcgcgatggaaggactcggaacctttcaatacgcggcggttaagggcgcctttaccggcgtcggcttcgacggcattgcggttgcgcttctcggcggcagcacggcaatcggcgttgttctggcggcatgtcttctcggcggccttaaagtcggggcattaaatatgccgattgaatccggggtgccttctgaagtcgttgacatcgtcatcgccattattattttgtttgtggcatcaagctacgccatccgtctcatccttgataaattgaagaaaaagggggcgaagtaagtggacttcctgcagattttatccattattgtcccggcaacactcgtatatgcggctccgcttattttaactgctctcggcggcgtgttttctgaaagatcgggagttgtcaacatcggtcttgaaggactgatgattatcggcgcctttacaagcgtcatgttcaacttatttttcggacgcgagcttggcgccgccgctccgtggctcgccttggctgcggctatgattgccggcggactgttttcactgatccacgcggccgccgcggtttctttccgcgccgatcagacggtaaccggtgtggcgatcaatatgctcgcgttaggagcgacactgtttatcgtcaagctgatctacggaaaggcgcagactgataaaatcccggagcccttttacaaaacgaacattcccgggttaagcgatattccggttttaggaaagattttcttttccgacgtatattatacgtcgattttagccatcgtactggcctttgtttcctggtttattttattcaaaacgccgttcggcctccgcatccgttctgtcggggaacatccgatggcggccgatacgatgggaatcaacgtgttcggcatgcgctatatcggcgtcatgatcagcgggctgttcggcgggctcggcggcggtgtatatgcttccacgatcgcgcttgatttcacgcactccaccatttccgggcaaggctttatcgctctcgccgcgctggttttcggcaaatggcatccgatcggcgcgctcggggcggcgctgttcttcggatttgcgcagagtttgagcattatcggctcgcttttgcccctgttcaaagacattccgaatgtatacatgctgatggctccttacattctgaccattctcgcgcttgccggcttcatcggccgcgcggatgcgcctaaagccaacggcatcccttatattaaaggaaaacgctgattgtgacacaaaaagagttccgcaccccggtgccggaactcttttcatctatatacgattctgatatactcacgcggctgaaacggtgttagcattgattcagccgcactcagcttgtcttctgcgtattccgcaccgagaaaaaaacgctcccaatcatccgcctccgtctgctgccgcgttttgcagaaatcatcaactatgaatgttcctgcaataatagaacaaaatattccaatacaggccgccgcctttctcttcatctgaccagctccttttttaaagcttgatctgaaagataaatgtatatacaaagatcaggatatttgataaatttattttaggttcaaaagaccacaaaacacagagaggaatacattatgccgtagcagggtaaaaaaaagtgcgatataatttggactgggtcctatgaccgtgaattgattgattcactcttacataaagcagttgcttgatgaaaaaataagcaaaggaggtcttctgttgcagctgttacatttcgcgattttggcgccttttttatttgcatttatcgttccctttctttataaacgggtaaaacaagtccatacaggctggtttgtgctgatagtgcctgttgtgctgtttgtttactttatcagcaagctccctgtcacaatggctggggaaaccgtccggtatgcggccgaatggattccgtccctcggtattaactataccgtttatattgacggactcgggctgttattcgctttattgattacgggtatcggctctttagtgacgctttacagtattttttacttatcgaaggacaaagaaaagctcggccccttttatgtgtacctgctgatgtttatgggcgcgatgctgggcgttgtgctcgtcgataacgtcatcgtgctttatatgttctgggagctgacaagcctgtcatccttcttattaatcgggtattggcataagcggaagaaatcacgctacggggcggaaaagtcactgctgattaccgtcggcggcgggctgtgcatgcttggcggctttatcctgctgtatctgatgacggattctttcagtatcagggaaatggtcaaccaggtgcatattatcgcaggccatccgttctttattccggcgatggttctcctgttattgggagcctttacgaaatcagcgcagtttccgttttatatctggctgcctgatgccatggaggcgccgactcctgtcagcgcctatctgcactcggctacaatggtgaaagcgggcatttatctgattgccagattcagtccgatttttgcattttcacccgtctggttttggacggttgcctcagtcggtctgatcacgatggtatgggcttccttcaatgcgatgaaacaaaccgatttaaaagcgattctggcattttccacagtcagtcagctcggtatgattgtatcgatgctcggcgcaggagccgccgcgcttcattaccagcattcagagtattttacggcggctgtcaccgcggctgtgtttcacttaattaaccatgctacttttaaaggaagtttatttatggcggtcggcattatcgaccatgaaacgggaacacgggacatccgcaggctcggcggactgatggcgcttatgccggtaacgttcaccgtttcactgatcggaacgttttccatggcaggcctccctccgtttaacggctttttaagtaaagaaatgttctttacaagtatgctgcggattgctcatgcagatattttcagcctggatacgtggggcgtgctgttccccgttctcgcatggatcgggagcgtcttcactttcatctacagcatgaagctgtttttcagaacgttcagcggcgcgcgcaaacctgatcagcttgaaaagacgccgcatgaagcaccgctcggcatgctgatttcgccggtcattcttgccgcttgcgccgtcagtctgttttttgcaccgaacgttttgtcttacagcctgattgaaccggcgatgaactccatttatccggctctgttaaccggcggagatacattccatgtccatatttcccagtggcatggggtgacggctgaggtaatgatgaccctcggcatcatcattgtcggcacgatcggttacgtaacgctgtctaaatgggagcggttgtacggtctgtttccgaaaaaactgacgctgaacaagctttacgatgcggtgacgggcagtatggaaaaaagatcttaccagctgacgtcatcttatatgaccggatttttgcgggattatctgctgtatatctttgcggcgtttatcattctcatcggagcggcgttcgtcacaaaaggcggcttttccatgacagcgaaaggaatggctgaaatcggcctgtatgaaatcgtgctgtccctcgttatggtgagcgcaacgattgcgactgtgttcgccaaatcgcggctgacggccattatctcactcggtgttgtcgggtacacactcgcgctgtttttcgtgattttcagagcgcccgatctggcgctcacgcagctcgtcattgagacgatatccgtcgccttgtttcttctttgtttttaccatctgccgaaaatgcggcggaaaaagaagacaagaacattccggatgaccaattttatcatttctctcggtgtcggcgtcatcgtgacaatgctcggaatcgcgtcttccagcgaaaaaacaaaagacagcatctcctcctttttcaccgcttacagccataagctcgggggaggaaacaatatcgtcaatgtcatcctcgttgatttcaggggatttgatacgatgtttgaaatcacggtgctgtcgattgccgcactcgggatttacggcatgatcagaacgaaagtaaaagaggagggagaagagcgttgagacagcaaaacacaaacgacatcatccttcagacggcaacgaagcttgtatcttttatcattctgcttttctctttctatttatttttatcggggcataacgcccccggcggaggatttgtcggcggactgattacgtcttcggccatcgtgctgttgcttttggcctttgatttaaaaaccgtcaaatcgattttgcccgtcaattttatttatgtggcgggcgcgggtctgcttatcgcgattgcaacgggtgcaggttcgttcttattcggagcaccctttctcacccatacattcggccattttcatctcccggtgcttgggaatacggagcttgcgacggccactttgtttgatttaggtgtgtatctcgttgttgtcggcgtgacgatgaccattattcaaacgattggagaggaagaataatggaaatcttaatgtctgtcattgccggtattttgtttatggcggcaacctacctgctgctttctaaaagtctgctgcgcgtgattatcggcaccgcgcttttaagccacggcgtccatttgctgctcctgaccatgggcggactgaaaaaaggcgctcctcccatactgggcggaaaaagcacgtcgtttgtcgatccgctgccgcaggcactcatactgacggcgatcgttatttcgttcggcgtcacgtcctttttgcttgtgatggcgtttcgcgcctatcaggaactgaaaacggacgatatggatcgaatgaggggaaatgatcaacatgaataactttgtgatattgcctattctggtgccgctgcttgccgcagtgctgctgatttttatgaacaggcacgtgatgctgatgcggatattcagcactgccgcttcctgtgtctccatcgtcatcagcgccgctctcgttcagacggttttcacacacgggattcagacgctgacactcggcggatggaaagcgccgtacggcattgtgctcgccgcggatcagctcgccgcactgcttgttttgacaaccgccacaatcgggctgctcgtcaccctgtactccttccgctccatcggagaaaaaagggagcgcgctttctattattcaggggtgcagtttcttctggccggcgtaagcggagcgtttttgacgggtgacctgttcaacatgtacgtcttttttgagcttctgcttatcgcgtcctacatgctgatcgtgcttggcggaacgaaaattcaattaagagaatcattgaagtatatcgtgtttaacattgtgtcatccgcgttttttgtcatcggcgtcggttacttatatgcggtgacgggcacgctgaatatggctgatctaagcgtaaaaataagtgaatcgggccagaccgggctgataaccgtcatcggcgtccttcttctcgtcgttttcggtttaaagggcgggatattcccgctgtatttctggatgccgggctcttattacgccccgccggctgcgatttcggccttattcgggtctcttttgacgaaagtcggcctgtacgccattttaagagtattcaccctgatctttattcacgatacgggctttacccaccaattgatgatgtggcttgcgatgctgacggtgctattcggcgtcatcggatctatcgccttttcggatgtcatgaaaatcgtcatctacaatattattacagccgtcggcgtgattttgttcggcattgccatgaacacgccggcctccattcaaggagcggtttattacttgattcacgatatgctgattaaaggagcgctgtttatgctcgccggcacgcttatcgcattgacgggcactgccagcctgcataaaatgggcggattgatcacccgttatcccgttttgggatggatgttctttatctcagccatatctctggccggcatcccgccgttcagcggatttgtgggcaagctgaagatcgcggaaggcgggttcgataagggggaaactttgttttccgtattgattctcttatcaagcctgcttgtgctctattccgtgctgaaggtgtttacgacggctttttggggggaagaaaaagaagtccccggcgcaggcggacggtccgcaaaaggacttctttatccggcagccgcttttctccttttgtcgcttctgttcgggctcggaaccgaatgggtttcaccgtatgtcaatcagacggctgagaatctgctgaatccggaaaaatacattgaagctgttttgaaggagtagatggcatggcttttcaactattattaaatgttcttctcgctgtttgctggatgtttctcacaaacagcctcagcgccgggggttttatgaccggatttatcgcgggcttggcggcgctgttttttttccggcgcttcttctcgcggccgttttacatttggaaaatatggtcagtcatcaaactggcgctgatctttataaaggaattatatttggccaatgtcagcgtactgaaaaccgttatatcgccgaaactgaacatccgcccgggcattttcgcgtttaagacggaattgacggaggattgggagatcacgctgctctcgctgttaatcactttaacaccgggtacgctcgtgatggatatctccgatgaccggtcgattctctatatacacgccatggacattgaagatgcggagaaagcgatccatgacatccgcgtctcttttgagaaagccattcaggaggtgagccgctgatgtttacgtttattctgcaattatcactcggcattatggcggtttcgactcttctgtacgtcattcgcgtcataaaagggcctacgataccggaccgggtcgtcgcgcttgatgggatcggcattaatctgattgccatgaccgcgcttgtatccattctcttaaacacatcggcctttttggacatcattctgctgctcggcattttatcgtttatcggcacgattgcctttgctaagtttttggagaaaggagagattatcgaaaatgatcgaaatcgttaaatgggccgtcgccgtttgtattctgatgggatcgctgatctgcctggtcgcgtctttcggcacactcaggcttcctgatgtgtatacgcgcgcccacgcctcttcaaaaggctcgacactcggcgttaatttggtattgctcggggtgttaggctacttgtggatgctgaccggagaaatttctgtaaaaatactgctcggcatcatttttatcctgctgacggcgccggtcggagcgcacctcatatgcagggccgcgtataattcgggagcggcgcttgataaaagaagcgttcaggatgattacaaagggatcagaaactttgtgatcaaacgtaaagaagattcatatttgtaaaaacaaacagccggacgattcagggttccggctgtttgtttattttgttataacagccagcgtgcagcgagaaatacagatcagcctttcccgttcatcgaaaatgttaatctcgtacacaatggttgccctgcctgtgtgaacgggtttcgcaatcgccgtgaccgtcccgccctctttcacggatttcaaatgattggcattaatctcaagcccgacacacgcctggttcgaccggtcgataaaatgctgggccccgacacttgcaacagtctctgccagcgctgctgacgcgccaccatgcagatatccgaaaggctgcaccgtcctcttatccaccggcattaccgctacgcatctctccgccgtgttttcagtgatttcaataccgagtgcgccgagcaatgtattgttcagattcataggtcattctcccttcaagatttatagtacgttgtctgacttggcgatcagcaccgcttcagttcgggagccgacattcagcttgttaaaaatggatgtcaggctgtattcaatcgaccgcttgcttaagtgaagcgcatctgcgatttcctgattggtcaaacctttttcgacctcttggagaatatggcgctctctcggggttaaccgatcctgctcactttgaggggaagaagacgtttttgttttttgctgggtcatcagctgtttgaaataggagaaatcaactaaaatctgtccgttgagcacgtgatatatgtattgcatgattttctctttagattcggttttgctgatggcgccatgcaggcccgcgcggatggattcttcaaaataatcttcaacctcatagcctgtgtagacaatgattttacagagaggattctcttttaagattttcttggaaagctctatgccgctgatgtcatcacccagatttaaatccattaatatgagatcgtaagctgaaaaatcatgccggagaacgaattgttcactggcgtcaggactgaggcaatcgacagaaagattcgtgtccgtttccagaatcgtcttggtgccctccatgacagccggatgatcatcaatcactagtatctttttcatggtttcctcccttttactcactcatttccattttattaaaaagacttggcttctgccaagtcgatttggtgataaattggttacaattccatttcaatatctactttaaaaccgtttccttcacttgtgtcgattttcatccgtccgtcaagcgcccggacgcgctccttaatacccgaaagacccatgctcatcgactgcccgccgccttcttcctgattgcatccgacaccgtcgtcttcataatgcagaatcactttattttgaatgctgatcagcataatcagcacctcattcgcctgtgaatgcttcatggcgttcgaaagaaattcctgaatgatgcggtacaaattcagctgcgtatccaaatccagagccgccgtaaaccggcccgtattcagacggatatgaaacggcgcacgctcctgctgctgcgcggcaagcttggataccgccttgaccagacccaaatcatacagcagctgaggacgcagctcatggcacgtctcccgggtcatcaaaatgacatccgacatctgctcattcatctgatgaagcttgtcctgcacctctaactggcaaggctcctctttcttaaaatcggccagaaacagctcacactggcgcttcaaagaaatcaagtcctgcagcactgaatcatgcagatcacgggccaaatccgaacgctgcttttcctcgatcgtaaacatcagctttttgagccagaccgggtttgagccttgttgttttagatcttgtaaatggttcatgagttcttcgatctgtatcacgttttccatagagacactcgtatagaaagacaatgttttcagccatgaaatctcatcccgtgtcagtctcggtgtattaatggaggacaaacaaagcaaaacataagaacttcccccgcgttctcctatcttgattaagaaaccgcggtttagctcaatgatttttccaatctctgaagtaaccttcttaaattcttttgaatacatttcccaatcaggttcattatcccttttatcatgatataaaatgtcaccctcagaggtaacttcaaagacataagctttactgacaagtagaacatccagaatcgtcttttttagttctttaaacatttgttttaaagatgttatgcttctgataagctgagtatatttgaatatactatcttgataattaaatttttcagaaaaacgttttaaccgaaatttataatccattacttctttaaaataaaaaatgacaaatatcataataaagaaaaatacagtttgctgagcaggattcatttgtatatctattgactcgaaccaagctgaaatcccaacaataaaaagggctggaactaaggcaagcaagccatagtacctcatcctgcctaaaatgaattcaatatcaaaaattttgttagctacgaactggtataccaaccccaatgggataagcacgagcagggatgccgctgccaacgcatctaatatataacttcctgtcaaaataattgggattacataaaaaagcaaaaagggcaaaaaagagagcgtgtttgttaaaattaaaatcttaagaatataagcatgttctgaatacttgaatttatacagatgatagaaaacagatataaatgcatagagagtcacgaagaaaaacgatactaaatttaaatttgttgtgaagtcatatgaataaatatgtcgaaacggttcgtttaagagattaattatcggtatgatatatagaaaagaaatcaaacgattggcaaattttttacctaattccttgaaatactcttgaataaactggagataaaatataggtgaggcaatgaaggtaaacaaatttatatatctgttaaattcatgacctcttgagggaccaccagcactcatataagctattgagatatctaacaggaagagaattaggacatacccagctatcgattttctggtttgactcacctttacaatataaaatatgcatattaaactcaaaaaataaaatacaaggggaaggacaaataaaaagtaactgtagtatccatttaaattaacaatatcaaaatcatctaaatgaatttgctgtccatttctttttatatctaagctcttaacgtgatagagagtatccccttttagatattttaaagatggttttttattattaattttgacaatcatatcaccttgttttaaacctacaaattttccatacgaggtttttgacatttcagcaacttcgagtactttatgcttattttctacaattttcgtgcctacaataattccatttatgttaataaaagcgacataacaaacatagataacacttaaaataataatggatattgtaaatggctttataagcttcttcaagatttacacccttcgcttattattcattatcccattttttattgtccgcacccatcattaaataattctcaaaccctttaatgataatttgggtttgtatagagtcataaccgataaggctagcttcattgcttttcagtttctttaatacatcaggataattcaaaaaataatttattaaattctgcatcttcatcatccttcttattattcttattattcaacaagtgtttttttattatttttatcttctttatatctaaatttaaattttcaacttcagtttcacacttatgcatgtatagttggtataaaaccgaaacatattgagatgctccagaatcatacagcttttggataaactcttttttattaagccgcagttgcgaatataatttttgatctgagaatatacaaagcaattcttgagaagacttattaaacaagcgcttaagatataaattaatcaatgtatgtttatctttcagaatatcactagtattatccttaaaaatagcatgataatcgccggaaatttgttcaaatatccctttataataggaataactttcaacagatttattgaattctccagttgctaaaagcgtaccagtaacatttgctaacgcaaataaacttccgcattttaacttgattacctctaaacattcatcttctgtctttggtttattgatcaaatcatcatgttgaccctgcattgcatcttgaatatattttaatacatacttaatcactaaaggattcgtactaatcgaattaatgctttgcaatcctgctgtgtataatgaaaatgctgcacttaatgctagtgaacgatctatcttcatccaaggagcatctcgattatcctcatcttccagatcatcaattatatcggaagtaagtgtaagaatttcaatagcggcacctaagttcactgcggtttcttgattttcgccgtcaaagatcacataatgcaaaacagctgattcagctagagaaaaatttttttttggttcaataaaactgagaaggagctgcattagatgttcattaaatatgttccgctctattatactcttcattctattcttgatttggttggcatctaaacatatttgctcaataattgtcttcaccctcccattctattttactaaatgcaggtgatgaaagacagcaggtttttcgttttttaacaatcgtataatactttatccatgaaatggataaaaaatgcacaaaaaaaagacttgtttccaagtctttttaagaaattttcattgcatatgagaatttatcgagctgatcaatgcttttgttaatgtttcgtaatgagtcggttgtttctctgatatcattttcaagtcggaataataattgctttacttcttctaatttgttttccaccgtttccacactcctttttttgaaagatcaatgaattgtgtatggtgaacgagtcctaggtatttgatctgttactaatagtgtaaacgtttttgcgggatttttcaccgaaaagtatgtgtaaaagtatctgcgtgacaccgcaaaccgtggtaattctatagtcccgaatggagcatttagcgaacaggactatataactaccagaaaggcagacgtttaggatgaagcagaccaatctggcggttctgctgtttttttaacggttttccgacaaaccggcaaggactatagtccctgccgtcgcaatttcaaaacagaatgggcgaacagcgtcgcataaccaccgacaaacaccgaaaagaccgcaacccccgcattgtggtctttttgcatgtcataactcgttatcatgccgcctatactctataacgaatgttttctcaggaaggaggccgccgtatgcattatgtgtatccatgctgtcctgttttcgccgcgccataccggcatcctgcgcccagtgccccggttcacgcagatattttgacagcgtccgcaaaagaggctgcgggcatgctggaggatgcgcgcctgctccttgcgcggctgtcggcgtcaaaagagcttgcgcgccgcattctcaccgcagcgcaatcatctgacaccgcagcggtcaagcggctcattaagcagaccggcatcaaaaatgactttgacgtgacgtataatcccgacggcatccgtgtcagtctgatcagagagcaaagccggtttaccatcgccctcaggtggtcggcttaaagcggctcaatccacgatcagctgccggcaccattcgatcgcctgtaagtaacattcatacgcttcttctttgttcagttcttttccccactcgtcacagtcccagttgttgcattcaatggctttgacgaacgcgagcatcttataataatcgttttcataaccgagcagcgcctgtccgacttcatcgattaaaggcagttctttgatgatatcctccagctcccggtggagaagcgtatcgatgagcgaaaacatgccgatcagcatgtaagaagagggctggggccttccggttcttttcgccagcagttcgcacagtttggccctgattaaggaaatcttaatgatttctttttggcttgaatggcttttcgccgttaaatctctgaatgaaagaatgtaaatcaagcgcttaatctcattcagcccaagcatcatgatggcctgctggatgctgtctatcttttttttcagccttgtttgcgatccgtttaaaaaacgcagaatctgatacgataagctgacgtcccgctctatgtattccgtcacgcgctgtatattgggctggtcattgtttaattcgcttaaaagctggtagtaagaatgaaaatgaaacgtcagatcatttccgctgatgacacgcggttcactgaaaaaatatccttgaaacaggtgaaagccgtctatggccgcctgtttataatcttttctcgtctccactttctccgctaaataaatcagacttttacagctgtacgtctgaatgatttttttgcgctccagacgcgaggattgcaaaaagtcgatttttaaaatatcaatatatttcatcagctgttccactaactcttcattttccggattgatggcgtaaaaatcatcaagtgctaatgtatatcctaatttcttcagctgtctgcatcttgagatgagtgccggagtgatcggtatgtcctcaagaatttcgataataagctggtcaggatcaaaggaggtagggagatctgaaaacatcaggctttctgtaaaattcacaaagcagcgtttcccctcagtcagcttttcgattccgatgttgataaagctgttaataatgagatccgtcgtagctttatctccatcagcggccgaataacggttctcttcgctctcccggtaaagaagttcataagcaacaacctgttcgtttctgttgaagataggctgtctcgcaacaaacaccttcattcatttacccccttagatgcggccttcgaacataagtatatcaaataacttgacgaaatttgtctaaatgtgaaaaatattatcacaacaaaaaggcctttccagagaaaggaaaggccgctttgtcttctattcaagttcccgtttcagcttgcttttgatttcatgaatccgctgcatcttgttgctccagcagtcttcgcttaaatcgaccggatattcttccggcttgctgatccgtttgtattcctcccacagaagtttgaggttatcctgcacgtattgctggatgtcggtaatttcgggattatcatagcataaaacgccgttttcaaagatcggctcatgcaagtctttcgcatagaaatcagtgacgaatttgctgacgaacgtgtggacgggatgaaacatttttaagcgtttctgatcatttacccgctcgtcataaagcgcgatataatcaccttccgagtggtgattcagcttgttgataatccggtatactctctttcttcccggcgttgtcactttttcagggtttgacgaaattttaatggtgtcggtcagtttgccgtcctcttcaatggcgacaagcttgtaaaccgcgccgagagccggctgatcgtatgcggtaatcagcttcgtgccgatgccccacgtatcgattttcgctccttgggatttcagatttaatatcgtgtgctcgtcaagatcgcttgaagcaatgacctttgcgtctgtgaaacccgcttcatcaagcatttcacgcgctttttttgacaggtacgccaagtccccgctgtccaggcggatgccgatgaagttgatccggtcgccgaattcctttgcgactttaatcgcattcggcatgcccgaacggatcgtatcgtacgtatctacgagaaacacgcagtctttgtgggtctccgcatatttcttaaatgccgtatattcatcgcggtacgcttgtacgagcgcatgagcgtgcgtgccggataccggtatattaaaacgctttccggctcttacattactcgttgcgctgaagccgccgatcaaagccgctctcgctccccacatggccgcatccatttcatgggcgcgccgcgttccgaattcgagggcgtcttcgtcaccgacaacgcctttaatgcgggccgctttcgtggcgattaatgtttggtaattcacaatgttaagcagagccgtctcaatcagctgggcttcgatcaggggcgcttcgacccgcataatcggttcgttgttaaaaacgagctcgccttctttcatgctgtaaagagatccggtaaaagaaagatcccgtaaatactcaatgaaatcatcagcatagtgcaattccgtttttaaataattcagatcgctgtcggtaaatttgaagttctccaagtattcgattgctttttctaagcccgcaaataccgcatagccgttttcaaagggaagctttctgaaaaaaagctcaaaaatcgcttttttctcatgaatgccgtctctccagtacgtttcggccatattaatttgataaagatctgtatgtaaagacaaactgtcgtctttaaaaccatgctccaccaaaattgttttccccttccttactctgccacttgcgctccgatgctgttcttaaaatgggacagggcccattcatgcccttccggattaaagctggccacagcgttttgatgaatgacaatctgaaagcccttgttgtaggcgtcaaccgccgtgtgaagaacgcagatgtccgtgcacaggcccgcaagatgcagctcagtgatctgccgttcccgcagtttcagctctaaatccgttcccgcaaaagcagaatatctcgttttttccatataatttacgtttttggcgtgtttatgtttctcataaagaggcgatagccttccgtacagctctttgccctccgtgccgttgatattatgcggaggaaacaggcgtgtctcgggatgaaagtcatcgtctgcatcatgcgaatcaaccgcaaagacaacgtaatcaccgttttctataaatgcttgcgtcaaactgacaatcgtatcttcaatctgtctcgcgggttctccgcaggttaatgccccgttctctgctgcaaaatcattcgtataatcaatgcatataaatgcttttttcatagccggcctccccgccattcatatgaaaaccattatatcctatctccacttgtaagtgaattggcattgtaaaatgacaaacggtgttttgcccttttaagatttcaggagtgagcgctgaaaaatgtcatcctgtacgtaaatgccgtcaaggttcacggcataatcggcggcaaaaaccaggccgagcggcgtttcgaattgaagatccgatatgacggagcttcggacaccggcaagtgcggcaagcttcatatatggtgaataagcatgatacggaagccttccgtttatatagagcaccgcgtcttttcggcttttcagcgcctgtttcacttcttcatacggctgcttttgcagcacctgccccttcgtcagggcaatgatgactctttcacgcagcgagcctaaaaataaatggcgttcatccggtttcgtctgcagagggccgtacatcccctgctgtaaataaagatcaaccgttttgtcgctcatcggcctgtccctcctcagcttgttttacaattatctccccggacgggacgcggtaaaccgcttcgttacatttcagccacccaatgggagatcttgccggcgagctctccggcgggttcttcttcaatcagcttgctgaatgattgtaaaagccgctgcgccagcgcctttttctcttcctcataggaaatgatcgtgctccactcaagttccggaacggctacaagggtatgctgttcttttttattttcatgcagatatacatcaccgatcattccggactgcacggtaatattcgcttttctgattttcataaaaaattccccttttataaagactgattctattatactacaaaaaagcgacagcctcctaaaaggaggctgtcacgcgttaaaccaatcaggttcgtcaaacacatcgatgtcttcaaagcgcgttttgctgaatttattagtgactttgacaaaatctccggaatgaaacgcccctgcccccgcgcctgagtggtcaacggctttgggagaaatggcaaacacgtcaccgaagctcgccgcagcgtctccggctaaactcataatataaatcggtcccacaattgcaggcatacccacacctccgcttttctttacagcattttatgcgctgcatcgggagttgtgcccgtttttatttcggcttgcggctgtcttctagctttgaccgctgacgaagtttgataagccggacgatatttaagacgaaagcttttaaaaccgcgtaaaccggcacggccagaatcattgcgagaatgccgccgaaactgcccgctccgataagcagaagaataatggtgagcgggtgggtattcagccgtttcccgatgacaagcggagaaagcaggttcccgtcaagctgctggacgacaacgacaacaataacggcaaacagcgccttagccggcgaatccataaacgcgataatcaccgcgggcgccgccccgagaaacggccccaggtacggaatgatattggtgacagcgatcaccatcccgagaattaacgcatactgcaggccgatgatccaatatccgataaagcatgccgttccgacaaagagacaaatcagcagctgtccttggaaataggcggccaatgtgacatataagtcattaaatattttccgaccttccgcccggtaggaagtaggcaggattttaaccgccaagagcggaaaccgccggccgtccttcagcatataaaacaaaatgaacggaacggtgatcacgacaagcgtgatattcgtaacgacgccgaacactgccgacaggcttgccgtaatattttgcggaaggctttgtaaaaatcccgtcagagactgctggattttttctatcgacacataatcctgcgtcatcatccacgtaaaccatttggaatgggataattgcgccgtcaagacttgaatctgatgaatgtaatcagggaaattgttaatcagccccgtgacctgggaagccacaatcggtccgatggcggtgaacataaaggcaatcaggccgatgaaaacgagataaatgagcaggatcgccaatgtccgggggatttttttctcaagcaggcgtacgatcggattaaaaatgaaaaacaaaatgcccgagatcaaaatcggaaaaaacagcgtggtgataaaaccgaaaaacggctgaaaaataaacgaaactttcgttgatacgtaaataatgagcaaaacgagcaaaatttgcagcgtccaaaaatggacctttgatttcaacaagcggtttcctcctattgtcatgtgaacttgtactgtgattgtaccaaaaaaagccgccgtgcatctatgtatctcaaaaaagaagacgcaccggggttctatagggccgcctccggtttgcgccttattcgtgctgttacacgcgttcggtataatcaggcatgacggaaaccacatggcggtttctgatataaaatacacggtcatgcgtttcttcaatggcgatgtgatccggagtggcatcaatcagccgtcctctgacaatgcgtctgacggtttgaatgataaaccttgagccgataagtttatggatggtctgataaacgtaagggtccactaacgagacgatttgcgggcttccttgatgggccattttcgctgatcccctttactatgttttccttcagcatatgcagcggacaaaggctttgacacagtacgtctatcggagcggaaaaggtgttagtgagcatgcggagttatgtaagcggaaaaggccgcatgagtggcctagactgagcttcttatgggatattgggcttggtcaattaactgatcaagcttttggatttgtttgagcgcggccgtgtgatccatttggcggtaatggtgatgcccgccgggttcttcatcgagttcatctgcttgtttcacgatttgctggagcgtattcttgtccagttcgccttcaggcagataggaatcggtgtgaagcagaatcgccagcgcaatgtccttcgccgcttttggttcttcaccgagccggatgagcagcttatgcgcccgttccgcgcctttaatggcatggatatcgtttcttctgtacttttcataatcccatttgccgtctgtgtaccattcataatggccgacgtcatgcagtaaagccgctttcgccgcaagatccgggctgacacctgcttttacggcaagacgatatgcatgaaacgcgcaggcgatcgcatgggcgacaccggaacgctgtaaatacttttgtgcgattggatgggtgaagacatccattaacgttacatttctcatggaaacccctccttatttatatttttagaatcctaacataaatcgagaagaaactcaattcatctgatacatttcttataccccttatacgttgtttcattcatcatatgccgccggaccccgaagtgattgtacaaacaaaaaagagcagcgtaaaagctgctctacaaaaattctttgatatcgtatatccgtccgttttccggctcacccgcgatcagtgagtgaatgacgccggcgatgtattccgggcttctgaggtttttcgtttctttcagattgcggaaccgttcgatgtcatggaaatcttcttttgacgaagaacggatgacagcctgcatgtctgtatccatcactcccggcgagaatgagatcatgcggaccggcagctcttcatcttcctgttcaaacccgaatgttctcgtaaacatatcaagccccgcttttgagctgcaatacgcgctccatcctttataaggatttttcgccgcgccagatgcgatgttgacaattgttttgctgccgctgaacgcttcgaaacgctttgtgaacatttggctgagcaaaacgggcgccgtcagattaagggtgtagtggcggttcaattcttcggcggaagcctctttcgcccgcttgatcggttccaccatgccggcattattgatcagtgtgacagcggaataccgcttcttctcagcttgatcaagaatcgccttcatctgccgctctgtatctgccagatcggttaaatcaacactgtattctgtcagcccctcgcgcttttccccgcttatcgttcttgaaagcgcggcgacttcggctccttcttgcagcgcttgttccgtcagcgcccggcccaagccttttgacgcgcctgttataagaaaaaactgcatgaaactcctcctttttttcttattttacgggctgtcttcccgcaaacacaagcgatccgtttaccgctttgccttttcctgcgccgtgactttcgggatcaaatagatcatcgccgcaatcccgaggaggatcaagacggcataaatgacaggcagcagataagaagtctttttctcctccgtttccatatctgccgaggtatgccgcaccgcaggctcggcaaatgtgatacccagttttttcgattgcgctttgatcgtattcggctccgtgtctgacgatgtaaacaattttgatatcagtttgtcatccgggttttcggccggctgatcaaaggtaatatccttctgttctttcggaagcgccgttttttcctcggagtaggcatcgtcgtgcaggtaatccgtacgaatttcaatgtctttcttttcatattcattcggcttgacatcagtattttcctcattcgcggctgcggcttggggaaggaaaaggaaaaaggagagagcaaacagcagcaatcctttttccatgaacgtgttacgcctcataagactgatcactttcctccgttttttccgcaaacagccgaatgacgagcggaagcgccgccgcaatcagcgtaatgatcgcaagaaccgttacccccatcgcaaacagatggcccgttccgtattgaatatcgatatagactttcgaaaccggactgtcaaaggtgaagttcggcataatcaggtcgatcaaaggcgccacataaaagagaatgagcgcggatgatgcaatccatccggtgattgagctgaagacaaaggctgcccggataaaagctgaactcgccgcaagcaagagaatcgtaaagactgaccatttaatggtctgatcgtccggaagcgagtagatattcagaccgaacagactgatcatcaatccgaccataatgtttaaaatcccaaagagcgcgcctttgacaagaagcggcgcctgctgataatacgagctgaaatagccgatcagaagactgctgatcaggacgatcaccaaaatgacgaccggcggaacattctgaacccggtcttccggcacctctccgctgattttaagcgggttggcgagataatcgtaaacgtagccgttttcctgtccgtcaacgagcgcgttccctaaaatgccgtacacgtcatttctgatcaatttcgtggaatcgacgtttttgccccagttgctgttcagggtgtccgctttatgctggacgtcatttacgctttgctgcatattgtcggtatagctgatgatgccggactggcgttctgacagatggcccatcgtgtcagacatttgcaggacttcgcggccgacggtatcctgagcgccgagcgccatcgttccggttaatccgtctccgctgaacgcggccgcttcctgcacggcgccttcagccagctgatcggatgctttcgccgcgctgtctgaaatgctggcgagctcatcgagcactccggcttgttcatctctgatatacgagctgtagttatccgagaattcggtcatgcctttaatgaaattgctgatgtcttcatctgtctgcattttattgtttttcagattttcccagcttgccgtttcttccggtttgatggcgagaacggtttggacttcgccttgctgggctttcagcacccggtttttcacatcaggcagcgagcccgcgtcaagagagtgatagagtgtcgcctcatacagggataaatcattatagtaactcattaaatcggatatttcttttgtattgatgtcagcggcaaatatctgttcaagagcagattttcggccgctatccaatgacgggtagttcaaaatgttctgttccgttcttacaatcattctgtaaacggtattgaagtcttgttttctcgtttcttctgattcttccagctttttctttaatttgtctgcgcgttttttgacgtcatcaatctggtccttaaggccttggatttcttcatcaagagcatcgagacgttttttcagttcttcattatgagtctgctgtttctcttccagctctttttcaatttgctgaatgcgctctgcggcttggttcagcctttctttcgtctcagatatgtccgtgccgccgtccccttcagaatcgttcggatcgtccgccggctcatcagcaggcggagtgacgtttttagcggctgtcgcggtctggacggtttttggctcctgatcgcctgtgttatcggaagcaggctgctcttcttttgtgccgtcttccgtttttccgtcttctccgggattcgttccgttatccggatcggtatcgccggagttttcaccgtcatcgccttggcccgggttttccggttccggtttttctttttccggttcttttaatccgtcagaaatgtcattgatttcagcggagatgcgttttaattcgtcacgctgatcgtcaaggtccattttcagatcgccgggtttttcttcttccggtttttcttcttctttcggttcatccgagccgtcatcccccgggtccttttccggaacggttaaagcctgccgatcccttttcataagggtttggatactgttcagtgtttcaaatcttgcttgagctttatattgagtcaaaaaattgttcagtaaattggattgaatatctgccatcccgtgttcctgctcaggaacctgcgcttctctcacctgttgggcggcaagaagagccgatcccgtctggtcaagctgtgtctgcgcccggtttatgcctgaagacagcccgctcatcatcgtgctgaactggttggcggcctgctgtgctttaatggcattcagtccggttgtgatttgcttttggttttgttcctgcgcggccatcagcagttttttctgattttcttgatattgtttatagcgctcgaccgtgtcggcaaagtctttaagcgtggttttggcttcatctgccgaagtcaatttttcttttgccgcgccctgcgcttcattcattgattttttcagttcgtcaatcaggtctttttgccgtttgatttcacctgccaagtcattggagctcggcttgtaaaagttatacatgacgttttgaaactctgattctttattgacgatcttgtcaaaatcgcctcggacattgttcactttttgcgagacgaaattccaatataatgccgacatttttttattcattgatttttgggcgtcttctagctcacgctgcaccttttctttgttgacggcgttcaggttgctttgaatattgaatgtcagcgtggctttttgcggacgctccttgtcatagcttaagatatcttttgaaaaatcggatggaatgtaaacgacggcgtcatacttcttagccgccagaccgttttcagccgcgctcctgttgacaaccgtccatgaataatccggacggccgccgagagcggccgctacttctttgccgaaatggacggattcctcttcctcattttcatctgtttgtaagcccatgtcttcattcacaactgcgatttggcgggtggcgttgattttttgttttcccgggtcatcgccgataaaccggaaaaacagcaccggcagcagcagaatgatgacgaccgcggctattaatttgatcaggctttttcgttgttcagtcatctgacggcctccctttccgctgaacataaaggtatttggattttttgctccttcccgttttcaaccaaatagccgaagcccggctgaatgtccggttcctgcctttggtaaggcagcggaatgacattttgttcggattttttcacaagcagcatcgcgtggcggatctgtttcatttccgtcgttaaggaatcatagccttttgagaattcgctgtgattgcccgccgggataaaactgaagcccacatgcgcgtaagatttcataaacatcgccagtttgtcctgaatggcggtgtcgatcgtctgctggaatcttgtaatgccgtcggccattaacacgaccggagagaaactgagtttgtggacatcgccatttttgacggcctgcgcatactgagcttcgcgctccgtgaaaatagcttctgccgtttcgatccactgccggacgtcttcttttgtgtccagatagctgacttttgtttcctgcgcatactgcgacagtccgcggtcaatcgagtcaaacagcccgacccgttccgtaccttcacgcagcaggtgattcagcatcactttcaggatgtttgtttttccccgctgtgtctggcctaagataaggcaatgcttatttttgcccagatcaaagtacacagggctgaccttttcctcatgaagcccgacaggaatgcggaacggttcttgatccgggccgagacggagtgaaaattcgccggccgtcagcctatccggaagcatcggaatcgggtctgggccggctgttcctgcgtggcgctcagctaatgctttgacatcggctttcagcgcctggaacatctcgaggtcattttccgcttcagccggaagaaacatttgcgcgaaatacagttcttctttttggatcatgacgcggcccgggatcggttcgagactgaacggcggacgcccgtaaatggagtatccttctgactgatccattaaataatggacgactttcgtttttatgttgtttaacagcggctggcggacggcgtttaccctcgttgcagtcagcaggaagtaaatgcctaagctttgcccgtcgcgtgaaatctggataaattccgtttctaattcatgcatttcatctttgacaatgtcgaaattgtcaattgtgataaatataaacggcagctcttcttcactgagcgaattgtacattttgatatggctgacttctttttctctgaacagccgtttccgccgctcgatttcttccttgatgcggatcatgaatttttcgatctttctcatttgatccattaagaaatagtctgcggtgtgcggaagctttgccaatggcagaagcgtgccgtttccgaaatcaaagatgtacatatgaagctcttccggcgtgtatccttccgcgaagttcatcaggaaggtgatggcagccactgacttgccgtagccggatgagccgaaaatgccgatgttgccgtcatccatcatcgtataagcgagaggcgcctgtctttgctgatcaggctcatcaacgcaggcgatgaagaagcggtctttttcctgcgcagggtaaagcgtgcgcgggatacgttcggcaagcggcggaagccacgggctcggcagcttttcaatgcccatttcattttgaatccgctcgatttcttcgactacggcttctatttctgccggggcgtcttttttcgccgcatcatccgcgtccacctcagacagcggaattaagccggtgtcggtaacgatggcaatgtcatcctcggtgccgtatacatcttccatgtaaggggcgccgctccaagcagactggaactgctcatacacttcgttatttccgacttgcaagtagccgcgtccggtgaccgtaatattcgccgcatcactgtttttcaggatttctttactgtcacttgcatcctgcactttcagcgcgaccttaaagcgtgagttgctccatatttggtcgtcaatgatgccgcccggcttttgcgtggcgagaattaaatgcacaccaaggctccgtccgatgcgggccgcgctgacaagctccctgataaagtcaggctcttcgcttttcagctcggcgaattcatctgaaatcaaaaacaggtgcggcatcggaatctccgtttctccctgtttatacagctttgtatagtcattgatgtgattgacgcgatattgatcaaacagacgctgccgttttttcagctcgctcttaatggatgcaagcgccctgatactgaagtttctgcttccttcaatattcgtgatggttccgagaaggtgcggcatcttgcggaacggctgggccattcctccgcccttatagtcaatcagcaaaaacgccgcttcatgcgggtggaaatgaacggccaatgacaggatgtacgtttgcagaaattcacttttcccggagccggtcgttcccgccagcaatccgtgcggcccgtgcgctttttcatgcaggtttaaatagacgatgtcgtcttttcctttatagccgatcggaacagccagcgattttgcagactcacttgtctcccacttctgtctgatgccgatttcttttacttccttcgcatgaaacagctccagaaatgagaccgtttcaggaatggaattcgtcattccgacctgatggtgcaatgtccgaagcgtccgggaaaaccgctcgttgtttgtccgttcgtgcctgtccagcttaaacgggatctgcaccgcttttttctgctgaatgagaatgtctccctcatcttcattaatgtagcggacgagggtgtgaatgttttccgccaggctttccttcgtttccgcggcgatgattgccgagatgccgagatgctcatgccggccttcgatgtattctaaaatgacgtgctctgcgatcagctgctgatttgtgatgacaaagacaaaatgcggctggaagatcttcttttctttatcttcttccaaatcccgctcccgcagcagctcgtaaatggacgataacaattgatcgcgggtctgttcattgtaaataaatcctttcgcgtacatatgaggcagctgaaattgcggcagccacttcatccattcccattccttatattcgtcctcatgaaagataaagacaaatcgcaggtcatggtagctgttgaagaacgcgagctggccgatcagctggtgaatttcatttttgacgatctggggtttcccgacaagccccatcggcccttcttgtaaatcaacggtcacgggcgcatggcggatatctttatacacacgctgcatgtgctgcgactgctccatcaagtcatccacatcacggttcgcaaggtctccgccgctcattgaaatctcgtagcttgccgggaccgtgcccgttccgagccgaagcatcagaaaatccctgctttccagcgatttctcccaaatgcggccgctgatttcagaagttaaatatttcattttttcaaacgggggaaaatgatgcgtcagcacttgcagctgtttttccgacagcgtctgaagctctttccgtttgttttctaaatactgcttgtacacacgctcccgtttttcctcccgttttttccgctggtttttttcacggaaatactgcacggtggaggtaatgagagtcatcataaacatcgccaaagagacaaggatgaatatgcccctcggctgtataatggcgacaacccccattacaatcagcatgaccaaaggaggcagaatgacgagccacagcccccggttattctgttcgctttcctgcgagggaaagctgaatgaaacgcggtcttctggaagatcgtagaccatacgcggcgttcttcgatattgcgggtatttctttttcatttcggtgcttggttttaccgttttggttaaaccggtttgaagcttttcgtgatgaacgacttctaaaaggtcgtcctccgtcagcctcacacgcagaaaattccacagcagctcatctcccgtgcggagcctttcgggagcttctgcaagttttccgttcacataaacgtcctggccatcagggacgacagaccagcatcctcccgactttcgcagataaaaagcccctgtttgagcggaggacggctctttgtatatatctgcttcctctgtttctgatgagaaaacgatctcatccttcccgccgataaaataaacggaggattcttctttgtcaggggtgagcagaagccgcatcgtctcttcttcaatccgacagggcatttcatttcctattgtcaattcgccggcacagttatttcccaggaaaacatcataacgatctgtttcttttcgataaagggttgcggcgttttgccgtaacggaagtgtgccgaccgtgattgtatctttcatatccggaccgatcgtaatcggctgagacggcgggagttcagacagctgaatcttttgtacgtgctctcggtaaaagacccataacagactcatatggcgaacctcctgacagcctgatcgttacctgcggccatttgatgtgtgctgttattttttttcatcttttttctcatctttcttgtcgttctctttgttatctttcgctttgtcttgtttgctttcatcctgtccggcggaagcttcggcggtgtcaccgttttcctccgcttctttatgctgctcctccgcctcttttttcgccttcgcaagctcgctttccacggcgtccagttctttctgcttttcgtcgtctttcatactgtcatccgctaataattgctgtttatattttgtaagtccgagccagatgtacgggttgtactcaagattgcggccgattttgatggcttcttcattttcccctctgccgatatcaatccaataaaggaaatgcttcgggtctgattgcagcgtgaccagattcccgatgtttttccgctgctcttccctcagattttcaactgccacataagaggaagcaagctcgtactgcacagattccgggaggctttccgcatcgtatttggcgagtgtgtcaatgactttgctgtactgctgatttaaaaaatagcggttgctttccgtaattgcctcttgcttcggctgggcgaaaaacagaacgtataaggagtaaagaagtgccggcacaaggaggacggcaagcgccagaccggcgtatctttggattttccatttctttttcggcagttttatgtatgtcttgtccctttcttcgagggaatcaattgcggtttgaatggtttcttccagttcttcaatcgtctccgcctctagcacgcttttcacctcaggagagaagtgaagcgtctccttgtacttcaaatattcatcgaaggtgtacgccccgtcagctgcaagcgccgcacaggctttgagctcgtttaacaccctttctctatcttcctcataaggcggaaggctctcctttacgccgtaatgaagaaagtaaggcgtcagcgctttatcaaacacgatattttcaggggcggcaatcagattgagacgtttcagcttatgctgtttcacggcttggacgagacggtaggcaaattgccacctgctttttttatcttttccttttatatagcggaaagcctgataagaagaaggaggtttgattgtgatggttacttcgtcttctgaaactgagacctctttttgaaaaaaaggatcagcatctttaatcacgtttgcttccagcccgtcaagaagcttgattttttcccgctggaaggtgaacgtgaagcctgattcggtttcttcccggacggcgtctaattctgtttctaaataagatctgttatgacctgtcattccaccatgtcctttcataaaatttcaaggcggtctccgttcgtaatgccgcagtcagatagcttttgttctccggaaaaaaccgcttctttattgaccactctgatccaatagccttcacgcggcggaacggatacatgctgagcctgccgggcaatatcaatgacttttttcacagaatggtaatctgacaatctgagatcgaagacgctgccgttataatgtgttaaatctattgtaatatcgatatacatattcatatcacccttacatagaaagagcgccgtcttcttgattgaatcaggcgctccgtttcttcattcatcttattatccgcgaatttggttagcgatatcttggtcagtagactcaagcgtatttgccgtttgatcgagctgatgattcacatcttgaagcaattcagacattttaataaatgaaggtttcagctgctcatattgatctgcaaatgcttcacttgaagcaccttcccacatgcttttcaaatcagaaatcatgcggttcaggcggtcaacctgattcatgacttcctgactttcaacgccatattgcttagccatcgctcttagctcttcgggtgtgacacgaattaatccagacatattccttataccctcctgtgtcatcagcctaaatatgggctaattcacttattttttgaacgtcattattataaaaacaaccattcggcacagtcaaacaaatctgttttaattttacaaaatgagtcttatgatatattggatttttcgtcacatttacacattttgtaaatgtagtagtatgattttcttattattttcgttttcatcgaatgatcttattgtcctagtctatttccctgcaaagatgcctttcagtctgaaaagcaagatggtaagatcaagatatgaagctatgaaaaagtagggatacagatgaccaatccaaaggatccatttaagtacagtttcgacaggcttgaagatgttgccgatcatatcagtgaagttcttcaatgccccattacaatagaagacgttaatcataaactgcttgcatacagcacgcacagcgattgtacagatccggcccggacgtcgacgattatcgggcggagggtgccggaaaaagtcatcaacaaactctggaaagacggaaccattccggcccttttaaaaacggaccagccgatcaaagtgaaagaaattgacgaggtgggcctgagcaaccgcgtggcgatttccatctggaaaaacagtcaggttctcggatttatttgggcgcttgaaatcaaaaaaaagcttaatgatgaggatctgaagacacttcagctggcagccaaagcggtgcggaacaagcttttgcacctgcagatccgcaaaacgaaaatcgaagagcggggccaggagtttttttggaaaatgctgaccggccatatttatcaggaagccgaaatggccgaagggtttcataagctcgggatggcgctgccgtccgtgttcagcgtcatgatcatccgtttacatgatgagctgactgaaaagacggaacagcagctgcaatatttgcaggaaacgacacagcagattcatgtcatgctggcgactgtcgattcaaatgaattaatcttattagccgcgccgaaaaccgatcagccttttaaagatgtaaagcacttcgcccttcatattcaaaaacagctgaaggaacgatataaaattgaggatgcgtcgattgcggtcggcggtatttacgaatcgatttcttatgtttaccgctcctatcaggaagcgctttccgtattaaaagcgaaagagcggtttgtgagagaaaccaaacaccttttcagcttttcggaactcggcatttatcagtacctggatgtgttggatgaaaaacgcaagcacagcggctatatgaactattccctctcaaagcttgagcagtatgacagggagcaccaagccgatatggtaaaaacgctcgaacattttattgatgccgacagcaacgtcaacaccgccgctaaagcgcttaacatccatgtcaatacattgaattacaggctgaaaagaatcagccagatcgcagaaatcgacttaaaaaatgtgaatgaaaagtttacgatttaccttgatatcaaacttcgcagcatgggttcgtgaaatttcacaaatccgtgtttttttattttctgtttcaaacaaagaattttcgcaaaaatcgcgctacacttgaaacatcacacaaacattgggggaaacagacatgattatcggggttccaaaggaaatcaaaaacaatgaaaatcgagtggctttaacacctggaggcgtttcacagcttatcggaaacggccatcgggttcttgtggaatccggagcgggactcggaagcggctttacaaatgaagattatgtatcagcaggggcggaaattctggaggacagaaagcaagtatgggatgcggaaatggtcatgaaggtaaaagaaccgctggctgaagagtatgcgtatttccgtcaaggtctggtcttattcacttaccttcatttagctgcagagccggaattagctaaagcgcttacagaaaaaggcgtgacagctatcgcgtacgaaacggtaacggacggacgttcccttccgctgcttacgccgatgtccgaagtggccggcagaatggccgcgcagatcggggctcagtttcttgaaaaaccaaagggcggaaaaggaattttattagccggcgtaccgggtgtatcccgcggaaaagtcacgatcatcggagggggcggcgtcggaacaaatgccgcgaaaatggctgtcggactcggtgccgatgtgacaatgatcgatttgaacgcagaccgactgcgtcagcttgatgatattttcgggcatcagattaaaacattgatgtcaaaccctgtaaatattgcagattccgtcgcggaagcggatcttctgatctgcgccgtgctcatcccgggagccaaagcgccgactctcgttacggaagaaatggttaaacaaatgaaaccgggttccgtcattgttgatgttgccatcgatcagggcggcattgtggaaaccgttgatcatattacaacccacgataatccgacttacgaaaaacacggcgtcgttcactacgctgtcgccaatatgccgggcgccgtaccgcgtacgtctacgctcgcattaacgaatgtaaccgttccttacgcgcttcaaatcgccaataaaggcgcggcacaagccattgcagacagccctgcgcttaaagcgggcttaaatacggctaacggacatgtcacgtatgaagcggtagccaaagacttaggctatgactacgtgcctgctgaaaaagcaatgcaaggttcggctgcaaaagcttaatagatatgaagaggacagcctgatcagcgggctgtccttttttctttctcataaaaggaaaaacggccccctgtctcgaatatcaattcatatcccggaagaaaaaggaggattcatatggctgttcagcactatggtgtattaaaaggcactgtgtcagatatgaaaagggaaacagatgatgattctccgcattttcaagtcgaggtgctaggcgagcctgatacgcgctatcgctgtgcgatcaatgtcatgtcaagttcaaaagaatcagaggttctgtatgcggcacgcgatcattttgacgcaagcgcgatcaccctgctgcccaacattccgtatggatataccccaattgatgaaaccagccgtgagctggcgctggattatgtccgcggcggattgtttgatccccggaacatggtgcccctcccgcatgaagtcaccggtccggataatgacttaaatgactttattgagacgtacatgcaaaaagcgaaatcagaaaaagccaccgtctatatttacggctctaaattcgggccggagccgggcgctgataagattttcgggttcaagccgacaaacggcatgcataatattcatatgaatcagggaaacccaattgatacacgctggaagaaggataacggaacgtggcacgacggcggtattttaatccagtttgcagaccagtgggccgcggtatttttggcttttctgtctcagtcgtggtgcacggatgaagaaggccacccttatacattttgtgatcatacacagcttaacggctgatgtccgcataaaaagcctgccgaaataacggcaggcttttcttattacattttagcggcttcggcctgtttcaggctttccggcctcatatcacgccagtttgtttcaatatattcgagacaaacggggcgggtttcattcgtgaggcgggtttcccagccgtccggcacatccagataggccggccacagtgagtactggccttcagcattgacgagcacgtggtatgagccgtcttcccgttcaaatggatttgtcatatcatctctttcctttctttaccggacggtacgccgtccgtttaatttctctgccagaatcgcgccgatgtcggcaagcgggcccggctggcacatatctttatggcggcagtctaagtcataccgctcgattttccctgtaatatacggtttccaagtatccggctcaatcgggtcaaaccactccggaataatcgtggatctgaagaacagcacatctccgtggaacggcttcggcttgtatgttcctaacagcccgacagaattaacgtacgtgtctttcagattcatcatcactgactcgtccagactggctaatgcgcttccctcacggcggagaatggtcagcgcggtgtcaaaatcaagcggctgatccccgaggctgtccgggtcgtaccctcccagggcaagcagcgcgatgacggcttcctcgtcatcaggcgcattttttatcggcagaaaatgattcggatacgcgtcaagcatcaccaaaagcgaaacctcttcaccccggctctgtaattgtgtcgccatggcctgaatgacattccctccgagagaccagccgagcagacggtacggccctttcggctgcacggtgcggattttttcaatataatccgccgccatgtcatctaagctttgcggaagcggttctttttttccgatgcctctcgcctgtaagccgtatatcggataatcagcctctaaagaagacatcagcccggcataacaccagctgagaccgccggccggatggacacagaacaacggtgtttcttctcctgccgttctgagcggaagaagaacatcaagcgcgcttgcgcccgttcctgactcaagtctttcagcaaggcttgccaccgtaggagcttcaaataatgttccgatactcagctcggctcccatcgcttcccgaatacggctcattaaatgaaccgcaagcaaagaatggccgcctaaatcaaagaatctgtcatcaataccgacacgcggcaggtgaagcacctctgcgaacagctcacacagcatttcttcctgcggcgttctcggtccccggccggtgacctccgtttggaagtcaggcgcagggagcgcttttcggtcaagctttccattcggtgtcagcggcagttcattcatttggacaaaagctgacggaaccatgtaatccggcaggctttcttcggcaaaccggcgcatgtttcccgtgtccaaggtgctgccggcagatcggacaaggtaggcggccagccgtttatctcccggccggtcttcacggacgactacggcggcatcctcgatatccggatgtttgacgagaaccgcttcgatttctcccaattcaatccggaatccgcggattttaatctggtggtccgccctgcccatataatcaagagaaccgtccgtccgcacacgggctaaatcccccgtccggtacattctcgttcccggcgggccgtacggatcagccacaaagcgttcggcggtcaggctttgccgccctaagtaaccgcgtgccacgcctcctccggccacatacatttcgcccgtgatgcccgggggcacaggctccagccggtcatcaagcacatatacgttcagatcaggaatgccgcagccgatgaggctgtttgctctcagctcggcaatgtttttgtctaattcaaggtaactgacgtgcaccgtcgtttccgtaatgccgtacatattcacgagcaccggctgattgtctgcgtggcggctgtaccaatcctcaagccggctcagctcaagcgcctcgccgccgaagatgatatatctgagtgcgagctgacgccccagctctttgtgttctttttccgcatgcatcagctggtaaaacgctgacggcgtttggttaagcacggttacccgctctttcacgaggagatgtaaaaacgcttccggcgatctgctgatgtcatgcggcacgacgacgagacgtccgccgtgaagcagcggcccccacatttcccagacagagaaatcgaaagcgtaggagtgaaacatcgtccatacatcatcagaatgaaagtgataccaatgccgcgtcgactcaaacagccggataacattgctgtgcggaatgatgacacctttcggcacacctgttgatcccgacgtgtaaatgacgtaggccgggtgaagcggtgacagcggccgaatccggtcagcgtccgcagggttcgtgacggcatattgccgaagtgtttctttattctgcgggtcatccaagatgaaggccggcatgccgctttcgatagagagcttacttgcgccttcacggttggtaagcataaatacgggcttggcatcatgtaacataaaagcaatgcggtccgcgggataatcaggatcaagcggcagatacgctgcccccgtcttcaggacggctaacagcccgacaatcatatctaaagaacgcggcagcgccagtgcgacaaactgctccgggccgacgccgcgggcaatcatcatgtgcgcgagctgattggctctttcattcagctctttataagtgagtccgctctctccaaatactgccgccgtttcatccgattttgcggcggcttgtatttcaaacagttcaggcagtgtctgccgaggctgaatatgctgttttgcccgtttaaccggcaaaagcttccggcgctcttcatcagaaagaatggttaagcttccgatcggtttttccggatgtgatgcggcatcttcgagcagaagaagcaggcgtccggcaagtgcttcagccgtttcttttctaaataagtccgtactgaactccagcaggccttcaataccggcaggcgtgccgtcgtcatggcgctgttcagccaattccagcgtcaaatcaaatttggacgatccgacactgctgatttgcaggcttgtttccatatcaggaagactgagtacagggtcaggcgtattttggaatgcgagcatcacttggaacagcggatgtcttgaccgggaacgaaccggattcaattcttccacgagacgttcaaacggcacgtcctgatgttcatatgctgcgagattcatttccctgaccctttcaagaagctcacaaaagctcggatcgccagaggtatcggttctcagtacgagtgtattaatgaacatacccacaaggtctcccaatgcgtcatcactgcggccggctatcggactgccgatcggaatatcggtccctgcaccgagccgggtcagtaacgcggaaagccctgattgaagcaccataaacaggcttacgcgctgatttctggcaagtgagagaagacgggcatgaagctcttggccgatgttgaccggaatgacgccgcccctgtagcttgattcagcgggacgcggaaagtcagacggcagctccagctgatccggtacattttcaagcgttttcttccagaaatccagctggcgcgcaattaagctctcagaatcagacgcgctgcctaaaagctgctgctgccaaagcgcataatccgcatattgaaccgccagcggcgcccattctgctttttcacctgtttgccgggcgatataggctacggataagtcacgcatgagcggattcaaggaccagccgtcacctgcaatgtgatgcaggagaatcatcagcgtatactcgccgtcaccaagatcaaacagctcggctcggacggccggctctttagcgagatcaaaccgatatcgtgccgcagcggcaagcatgtcttggagctcgtttttgtctgcacgtgtcactgtaaacacagggcgggcttcttcagcagataaaatgagctgatgagatgatcccttattttccggaaaaacggtgcgcaggctttcatgacggctgacaacatcgtaaaaggcgtgtttcagcgctgattggtcaagcttgcctgacatgcggacaatcaccggaatgttgtaagtcgggcttggcccttcaagacagtagagaaaccatagacgcagctgcgcaaatgacagcgggatatgctccggccggtcaaacggcttgagcttaggccgcgcactctttgcggtatcaagctgtgcggcgagcccggcaacggtcggcgtatcaaacagacggccgatgccaagctctgcgcccatcgtctcccggacccggctcatcaggcgtccggctaagagcgaatgtccgcccaattcaaagaacccgtcatcaattccgacccgtgcaagaccgagaacctcggcaaacagatcgcataatatttcttcctgcggcgtccgcggccctctgtcagacaagacagcggaaaaatcaggtgcaggcagagcgctgcgatcgagcttcttattcggtgtcagcggcaattcttccagctgtacaaacgcgcccggcaccatataatccggcaggctttcgcccatatattcacgaagtccgccgatatcaaggggctgatccgcgacagcataagccaccagccgcttatctccgggctggtcttcacggacaatgacggcggcctgcgaaatacccggatatttcgacagcactgactcaatttctcctaattctatccggaacccgcggattttaatttggtgatcggctctgctgatataatcaagcgagccgtcctcacgccagcgcacgagatctcccgtccgatacatcctcgcgcccgggggcccgtacggatcggcaatgaatctttccgctgttaaatcaggacggttataataacctctggcaagcccctcccccgctatataaagctcgcccgcgattcccggcgggacgggctgcaatgcggcgtccagcacatatacccgcgtgttccaaatcggctttccgatcggaggcgcccctgtatggccttttgcaagcggctgtgcggccgaccagattgttgtttcagtcggcccgtacagattcgtcaccgtacagcctgattcaagcagagcatgcataagcgcgttcggaagcgcctcacctccgacaagcacctgcagcgcccggagagaatccggttcattggtgactaatgaatgccacaatgtcggcgttgcctgcatgattgaaataccgtatgagtgaatcatgcgcgcatgcgcccgcggttcctgaatcgtctctttacgtgcgatgacgcaccccgccccgctgatgagcggaaggaagagctcaagtccggaaatatcaaacgccgcagtcgtaacggcaagcaggcggtcttgttcgtcgagcgtaaacatttcccgcatggataagaggaaattgcttacgctttttaatgtgacgactacgcctttcggtttgcccgttgagcccgatgtataaatgatataagcggggtgcaaaggcgaacattccgcctgagcgggaaagtcagcattttgagcggcaacggtttttaccgtatccgggtcatcgagaatgatcctttttgcatcactgtcttccggcatgcggccggataattccatcgttgtaatcaggcatgcaggctgtgcatctttgagcatgtatgtgatccgctcagaaggaaaatcaggatcaagcggcaggtatgcggctcccgttttcaaaacggccagcatgctcacggccaactcctgtgaccgcggaagcagcaaagcggcaaattgttccggtccgagccccttttcctttagcatgccggcaagctggttcgcgcgcttgttcaattcggcatagctgagctcttcgttttcggtgatgattgccggccggtccggtgtttttacggcctgttcgtaaaacagctccggcagacttttctgcttctcggccttgcgcgtgtcattccagctttccagtacgcggagacgttcactttcaagcagaaggttgagtgtgccgattttttgtgtctggtctttcacagctgattccaacagaagcaggaatcgtttttgatggttttcaatatcttcggcgctgtatacttccggattcgcatcaaagtccacacgcattccgcttccgtccgctctgtcgtaaacgttaattgacaaatcatcaacgggccctgctgataagttatgaacggtcccccgcgctccggcgaaatcaagcgcgtagtcaaacggcatcacattgacttgcgggccgaacagcctgcgattttctccgagcaatttaaggtcgcggcgcatgtcttcatggcggtatttctgatggcgccggatgtttcggatttcttttgccacttggctgacggcctcatgaaaattcatatccgggcggagagaaagccgtaaaggcagaagattcatgaccatactcggaatattcagtgaaattgagccgatccgccccatcatcggtaaaccgagcacgatatcccctgcgtttgtcatccgatggacatataccgccgctgcggccgtgacgacttcatgccagttcggaatcgcttttacatgctgtaaagccgtttcagaaagataagccgtgcttctccgaaaacgtgttgacgttcgcggcgctctttctgccaaactgacgacatcaggttcatccgcaaatttctccatccaaaattcccgatctttcaggaattgatcagacgcgcggtattcttgctcttcttttaccagatcctccaaagaaccgaaggagcgcccgttatccggacgtccttcccgtattgcggtgtacatttgcgccgtacgccgtgccagcagtgaaaaaccgtagccgtctatcgcaatgtggtgaatgcgctgataccagaaaaagcgttccggtcccgcctgaaataaaatgtcgcggaacaaaggcccggccgccatatcaacgggctcagccaaatctgtctgcatgagtctgagtgcggcctgcttcggatcagcttctgaactcacatctatgacatcgatcgcagcttcaaatggaggattgatgatctgcttcggcccgtctgccccctcctcgaagcgggcgtgtaatgacgcggcttccgtcagcacgcgttcgagagcggttttaaatatggtcacatcgatcgcgccgtttatctcaacgtactcgcctgtattgtaaatcggattatcaggatcaagctgctgcgcaaaccagataccggcctgtgcgcctgtcagaggcagctgttgtgtatcatgcattctattctctccctttataaataatctgcgttcggcaagaatttttgagatcgggaagaaagaagtctccaccactcttccagcgtcgggttctccgccagttccacaaacgtcacttcagctccgtcacggcgccattgttccacaaggctcatgattctgacggagtcaagacctctgtccagcaggtcttcatgatccggaatatcagacggtgattcttgaagaatcgccgcaatttgttcacgcacccggtcttttgtcaatacggcggaagtcttctcttctccttcagaaaccggcgcgccgcccagcagctccagcacttcgtttgtcaaagccgtgtaagcgcagcgctgagacgcatattcgatggccatcttatgtttttctgaagaaaaatcagcaacggcgtctccgataaagaagctttggatatcatccataaatgcttcacaggctgtgacgagacagccgatgtgtgcataaattcccgtaatcatgagctggtctctgccgctttcacgcatgatctcaatgagattcgtccgtttaaacgcgctgtatctccactttgtgaggacaatgtcctgatcatccggtgcaagctccggaatgatcttttcttcataaggtccgctttttagccccggcccccaaaaatccgtcagcagcgcacggtccgccgggtcttggctgcccggctgcgcggtatacaccaccggaatgccgagtgctttgcattgctcttttatttttttgatattctcagccgcctccgtgatcggagcttcacctttcgcaaaagcatcgacgaaataattctgcatgtcatggatcagaagcaccgcgcgtttcggattcagcgtccacgatactttattttcaggcatatctgacgctgtcggcagcgcatatgcgggaatagacggtatagccaatgtaaacacttccttttttaagattgtttgatttcagccggctttactttttgggcgatcgtttcgcgaagatcctttttactgaccttgccgacgccggttttcggaaaagaagcgataaattcaatccggtcggggattttatatgccgccagtccgcgctcacgcaaaaatgctttcagctctcccggtttcggcgcttctcctttcgggatgacgaacacacaggaacgctccccgagaaaatcatccggcattgaaaccatggcggcatcatgaacggcaggatgcgcaagaaggtgattttccacctcctcagcggctattttttcaccgccccggttgatttgatctttcgcacgtccttcgacgatgatatagccgtccgccgtcagtttgacgatatcgccggtctgataaaatccgtcggctgtgaatgatctttcattatgttcaggcgctttataatatccgcgaatcgtgtaagggccgcgtgtaaacaaatgtcccgcttcaccgggggcgacatcccgcccgtcatcgtctaaaacccttacctcatcaaaaggtgacatcggtctgccttgcgtattgacaatgatctcttcaggatcatccagtctcgtataattcaccaatccttccgccattccgaaaacctgctgaagggtgcatccgaaagcgctcttcacgcggcgggccgcctcagcgctgaatttggcgcctcccacctgcagcacttgaaggcttgataaatcatcacttcgcgaaccggatgcgtccatccacaccatcgcaagcggcgggacgagcgctgtaatcgtgacacgttctttttcaattaacgggaagcagtcatccggactcggcgtcggtgacagaacaacccggcccccggcatataaagttcccagcacacccggcgagctgagcggataattatgcgctgtcggcagagcggccaaataaacgctgtgatgatccaagccgcatatttccgcactgatgcgcaaactgtatatgtaatcgtcgtgtgttcgcggaatcagcttggacagccccgtactgcctcctgatagctgtaaaaaggcgacttccgccgggcttatatcttccagctgaacaggctctctatgcaggctgctcagttcctgaaactcttcagcttcgccggccacaatgacatgcgccaaatccggaagtttgcctttcacctgtctggcaagcgccctgtaatcaaaacctgaatgtatatcaggaatgatgtatgctttcgcctctgcaaactcgcagaaatacgtaatctcactgcttctatgagaaggcagcgcgaaaacgggcagcgctcccagccggaacagcgcgaaaatcacttcaaaaaactcagcgatattcggcagctgaacgacaacgcggtcttccttttgaattccgagcttatgcagccccgccgctaaacgatctgccctttcatctaattctttgtaggtccaatgtacatctttacacgtcacggcagtttgatttccgtataaagccgcgcgctctttcagcattcctccgaacgtctcacccttccagcagccgtcttttcggtatttgtcagcccattcttccggccatggcgtaaatccagtcagcacgatccgttccctccttttttacaactcatcttggtaaagccccatcgcccggagcatggtgcggaatttggccgaggtctcgtccagttcatcctgcggctttgatccggcgacaatcccggcacccgcaaagagccggagagaccttgtttccgcttcggcgcagcggagtgcgataatccattctccgtcaccctcagcatcacaccagcccgccattcccgtgtagaaattgcggtcaaacggctcaatatcctgaatcgcttctctcgccgcatccgtcggcgttccgcataccgcgggcgtcggatgcagggcgatggccagctcaagcgatgtcgttgacggatcacgcagctctccctttacctcggtggacaggtgccacatcgcctcagttttaatgagtgacggtttttccggcacatcaagcacacggcagaacggtttaagggcggcggccacggcggccacgactacggcatgttcatgcagatcttttgctgattgcagcagttcttccgctcttctctgatcctcggcaggatcggtgctgcgaggtctggaacctgccagcggattggacagaatcgatgttccgtttttggacagcagcagttcaggacttgcgccgaaaagcgtttttcttgtttctgacgttcccgtcacatccgcagcgaatgtatagccgcgcgggttgtgctgcgccaaatgcttgacggcctgtggaatgtcgatatccttttcagcggtcagatgaagcgtccttgacagcacgattttgctgagcggaccgtccgtaatgttgaatacgccttgttcaacaccgctcataaagccctcaggctccggaacgggacggatgtcatatgtattggattgcggcttttctgcggaagattccgcaaacgaaagcgggcctgccgtatggacattcttcggtacaaaaagccgggaagcttttctgccgtcaaaaggaatggcgccggccgcaatcggatgtttgatgccggcttgctttgcctcaagaagcgtctgtctcacgcgttcaggcagtgaacccagctgattttccgcgtctgtatcaggcacttccgcaaacattccttccgcaagcatcgtacttttcggggaagctaaaaagaacgccccgggcttgtaagcatccagcacctcttttgcagacacttccgccaataaatattgatttgtcatgtttgtccctccttctcgttacatcaaacgcctaaagtagcgccgccatcaacgcataaatcatgcatcgtaatatggtttgcctgttcagaagccagaaacaaaacggcatttgcaatatcagaaggcttcgccagcttttgaagcggaattcccgttttatatgtatcaagcgaacctctgatgacgtcccgggctccgttctcgtcctgccacagcgcccgctgcatgtcggtttccgttgaacccggagatacgatgttgcagcggatatgatgggccgcaagctccagtccgaggcatttcgtaaacatgacggcagccgcttttgacgccgcataagccgccatggaagcacgcggaacgccggctgcattcgaaccgaccgtaacgatggcgcccttttgacgctcaatcatgtaccggcttactgcccgcgacacatgaaatacgccggtcgtattaactgaaaatgtttgaccccaatcttcatcactgagggattgcaccggacccggccgcagcacgcccgcaacgttcgccaatatttcaataggccccatgtcgcgttcaacggcagcgatgatatcattgacagccgcactgtcagatacatctgcggcaaacccctgcgcctgcacgccttttttccgaagtctgtcagtaagcccgagaagcaggtcttcatttgtatctatagctgccacatttacgccttgttcagcaagggcaagcgctgttgcttctccgatgccttgagcggcgccggtgacaacggccgttttccctttcattcccaatgcgtccatattatcattccctttctatattgataatgattatcattatcaactatgattcaagacaatcatatccaaatcaaaacacgcagtcaattagaaaattaggatcagccgcatttagttcgaagggcctgttttttctcatgcgggagaatacggggtatgcggtcctcccggattcaggcagaaacgcagggccctgctgattaaaacgggcaggacagaaatatggccctctccttcaaactcgctgtattcagcacggactccatcatcttcaaatccggataataaagagtacagcgcctctgcgtgctgcgggattctgcttttatgtgttttttcaatttctcccgcagccagcaatacgctgacttgaagattttccgcagagagccggtctgacaaacgttccgctttttgctgaataaaacgcttgttccagtgaattgacggactcccggcaacataggtctggaacatgtccggcctcgtcaaaagcacttgcagcacaaaaagaccgcccagcgaatggccgaaaatcgtctgcctgcctctgtcgatcggataatcccgctccatcgcgggctttacttcttcttctataaaactcagaaacgcttccgcccctccctgttcgggccatgccgcgccgcgcggatgcaccggcagttctgattcagaaagcggcatcgtaaaatcactgtgacgttcggcggaaaacggctgatctgtcgggtagccgattccgacaatcaccgccggaacaacgcctgttttttcaggtcgccggctttgcacccgcaaagcttcggccattgtgccgaatacggaattcgcatcgagcaggtatatgacggggaagccggatgcaggcggttcttcctgaggaaaaaagacaaagatacgatacgtacggcctccttttgagcgcatttctcttacttctgtgcccggaaccgcgtatcggccggccggcgcgaaaccccgctttatttgttttccgtccattatgtgttcatcccctttgcggcaattgctttatctatgcttattgataatgattttcaatatcaaaagacacctcaaataataggttttttgccaaacaaagtcaatggatttttgatataaaaaaagcaccttatttcaataaggtacctaagaactatatagtgataggggcttaatcccatgtaaagcgctcattcttccatggatctcccctcatatggtagccgtttttctcccaaaagccggggtggttttcctttgtgaactgaatgccgcgcagccattttgcacttttccaaaaataaagatgggggaaaacgcctctgagcggatagccgtgctctggcgttaacggctcgccgttatgcgcatatgccagcagggatgtttcccgcgtaaaatcagaaagcggcaggttggccgtccagccctcttcagcgtgcagaatgacgaatcccgcttctttgtgcacgcccgctttctcagcgatgtctttggcgcgtattccctgccagatattatcaagacgggaccagcccgtgacgcaatgaatatcatttttcacttcggcttcaggaaaggctttgatatcttcaaagcttaacagcataggacggtcaacaagcccgtacacttgcagattccattttgacatatcttcataataaggaacatttccggcgtgaagcacgggaaacttcgttgtgacattttggtttggcggaatccgttccgactgttttgtttgtttcgttttcccgaaaaacatatggctccctccatttagtaaacctgtgttaaatctttgttgacaatcaatcacccttcgattacgctaatctggtacaagtgtaagggggaaaacaaatgaaacaacgcaaccttcgcgcgggcgatatggcgcttatcggcatgtttgccgcactgatggccgtcggcgccaacattacatcaatggctccttttttgcaagttgcgggaattccgttatcgctgcagcctttcttttgtctgttagccgcgatgcttctcggcgccagacgggcagccattgcaatgacggtatacgcattggccggactcgcgggggcgcctgttttcgctcaattctcagcaggctttgcgccgtttatcggaaagagcggcggatttattctcgcttatatcccggcggcatttgcagccggatggctgctggaaaaaacaaaaaaacccggccgcctgcattatgcatgggcctctttgatcggtaccgccgtcatttatatcattggcacgacctatacgtatattgcgctgaaattatggcttcatgctccgatcagctacggaatggcctggttttacatgatatggtttttcataaaagatatcgttttagcactgttattggcatcaatcgcgcctgccgtatacaggtctattcataaagcgacggggttcagcagaaatccggcgtaagatgttctcagcatacaaaaaggctcccctttccgggagcctttttttacaggacaagcgcggcaatccagccgaatatcacaagcggaatgttatagaaaagaaatgtcggtacgcacgtatcccaaatgtggtggtgctgtccgtcggcgcttaggcctgacgtcggcccgagcgtactgtcacttgcaggagaacccgcatcgccgaccgcggcggccgctccgattacggcaatcgtcgccatcgggctgaatccgagctgagcgcacagcgggacaaatatggtcgtaatgacgggtacggttgcaaatgatgatccgattcccatcgtgattaataaaccgaccaccagcatcaggagcgcgcctaatgattggctgtggccgataaggcctgttgatgctttgaccaaggaagccacatcgcccgttttattcagtacatttgaaaaaccggccgcaacaagcatgacaaacccgataaaagccatcagaatcatgccgtccgtgatcagcttatccgcttcattgcgcttcatgactccgctgataaacagcgtaaacaagccggcaagcgcgcccataatcataccttccactccgagcacttgtgacagatagagctgaacggcaagcgacacggcaatggagatcaaggcgatggcaatgctttttttcgtataaggagaagacgatagtccggcaatctccttcgtctcatatttcttcggtttccggaagacgatgacggctaaaattaaaccgaccgccatcccggccgtcggaatgattaaagcatacgggatatcactgagcggcacctttaaaccggctgacgccatattatctctcagcatcccctggaaaatctgtccgaatccgacaggcagaacgatataaggcgcagtcagtccgaatgtcatcacacacgcgatcagtctgcggtctatttcaagttcgttaaatatttttaaaagcggcggaatcaatacaggaataaacgcaatgtgaacgggcaccacgttttgcgagaaacaggatatgattaaaataatcagtacgattaacacttttgacagtgcttttttccgcgaatcttccttttttccgattagtttgacagacgcttccaccattgcatcgggaagccccgtctttgtcagcgccgcggcaaatgctccgagcagcgcgtagctgaccgcgacggtggcatttccgccgagaccgtccgtaaaagccttcaccgtctctccgaggcctaagccgccggtcagcccgccggcaagcgcgccgatcattaaagctataataatattgacacgcagcaggcttaagacgagcataagcaatactgcgacaacaacagcattcattgatgagtccctccaaaatcctttagtttgctaatgtagtagataattaaagttaccatatattctgcgctttagtcaactaaagattttggaaatcaaaaaacccgctgcatcaaggcagcgggatactgttatctttcgggcgtaaagcgctcagtcaaaacagccaacgtccttgccatgacgcctgttgcgccggcagggccgaagcatgtcgctttattcgccgttgcggttcccgcaatatcgagatgaacccacggcgtgttttccgcgaattcaccaatgaatgcccccgccataatcgcgtggccttctcttcccggagaattgttcaaatcagccatctgactgtttctcacccgttttttatccttttctgtaatcggaagctgccagatcggctcaccggattctttcgccgattccgccacctgttcataaaacgcggcgtgattggtcatggcgcccgttatttcgtttcctaaggcgacaatgacaccgcccgttaacgttgcgacgtctacgaggacagaggctccgttctgcttggcgtatgtgatgccgtcggcaagcacgagacgcccttccgcatcggtgttcaggatctcaacggtttttccgctgagcgaaacgatgacatcatccggcttcatcgcatcggacgaaatcatgttgtccgtagacggtatgacggcgagcacgttttgttcaggccgcagttcgccgataatttccattgcccctaataccgaggcggcccctcccatatcgcttttcatgccgacgatgccggttttcggcttaattgaatatccgcccgtatcaaaggtaattcctttaccgaccaggccgatgacgtcttcccactgatctttgccctgatacttcagaacgatcattttcggcggttcggatgagcccttgttaacggcaagcagcccgcccatgccgagctcttccatttcatctttttctaaaatttcacactcgaaatcgtattttgccgccagctcagcggcatatgacgccaaatcagtggccgtcagcatattacccggcatattcacaagcgtgcgggctgaattcgtcccttggccgtatgccgctccgacgttcaggccggcctgcacttccctcaggtcttcttcggtcacggcgcagactgatttcagttcctgatccggctcattcgatttatgtttataatcctgcacttcgtaaaccgcaagcagacagctttctgaaagcgcatgagcggcatcggcggcaggcacttccccggagacgaatgtatcgagtaaaacggatacttcctgttttttatcttgatgaacctgctgaaatactcgtgcaaagcattctttcgtatcttcaaacgaataatccgcttctcttcccaggccgataaaataaatacgtttcataccggtcgcagccggagggtatacttttgatacacgattgcgtttggcggacacatcaccatcctttaacagctgggtcagatgaccgtccaatttatcatccaattccttcgtaaatccgttcagcgtgcttttttgaaaaagaccgatgaccagtgtttcgggatgccgcagttgatcagatgcataaaacatgagtacacactccttatgtgggtatttgttatgtaaagtggtataatgaaaaaacatttttcattgattttattttaccaaactaagggcgttttctgcagtttttcgatacgatcggaatcagcagatacagaaaggatgttgcatatggatgtacttatgaattttcctttactggcgagttttgccgccattatttttgcccaagttgtaaaagtgcctattcaatttatcgtatccaaaaaacttgactggtctcttgtgacgagcaccggcggcatgccgagctcccattccgccgccgtcaccgcgctgtcaaccggagtcgctttgcaacaggggctggactcgcccctgtttgcagtcgccgcgattttcgccgtcattacgatgttcgacgctacaggtgtcaggcggcatgcgggtgaacaggcgacggtcattaataaactggtcatcgactttaatcggtttgtcagcgaagcgaaggactttcagaaagcggaagagaaggaaaaacagaagaaactgaaagaactgctcggccatcagccgattgaagtgttcttcggcggcgtcaccggtattgtgctgacattgattttagattatttctttatgtaaaaaacgcttcagcggatgctgaagcgtttttattcttttaccgttttgtattgatttctgaacacttgcatcgactttgtttcgttcagctttacaagttcgtcctcggtcactgtgccgttcccttttttaatcatgtagacctcaagtgtttttttgccccaattgttatagacgtccttgacggtgtcaaagtagaggtcaaggcggcttcctttaatttttgagccggtatcggcgacaaccccgtatccgtaattcggtataaacagaatcgtcccgatcgggaaaacagacggatcggccgcaacagttgaatataaatcgcgtttgaccttcacgcctgaatatgtaattccgtactgcggatgcccgggagattttccggtagattccgctccggcggtataaccggtggccgtcaccttttgtgacggatagcgttcccagtcaaaagcttcttccagcggttttatcctgcctgatgccttcttttccggctgattctgtaaggattgaaacggagtgccgatgtttttcaaaacggcgccgcgatgttccgtcatccaatttgtcagatcctttgcttcaactccggttatggaaaagtatgtcgcatggcatgcgcccaaaaagagcacgatcatgaatacgcgtctgattatcgtcaatctgaaatcactctcctccgagtcattgttcccaactcggtggggtgctatacaaaaagcgccgcggcacaaaaaaagctttctcgaataagaaagcggcttaaaacatttgatatcctctttttctgagcgcctttatggcaatgcctgacatgatggctcccgccagtccgcccgccaaaatcacgacatccgcaaccgctaatgacatgatgcgctgaaacaggctttgaaaggattcccccggcgcctgcacgtaactgatcatctttttattgctgataatgaaaaggcatacaatcggatagacaacagccataatccacgacattctaagcagcatgttcaacagaaagcctatgccgaaaaacagtacaaaaaatagtacaattgagatcaggacaaccggcaaactaatcacaaacatccaccccctacagcactttcagtgtacctcgggggcggtaaaaaagtcaacgtctggaaaaatcagcgtctctctttgccgcttccctggcaggagggacatgtttcggagccgccaagaagcaattgaaaataccctttacctgagcagaacggacacgccgccgtgctttttgctgtcgttttcatgcggatcaccctttttcttaattttctgataatatatcatatttacttgtcaagcaccaagtcagaatatgtaacaaaataactcatgtaagcgaaaacattcatttttttcttttacattcttttgatagcgctcttttttaaaagaagagaaaacccgcggctgcgggttttcagaagaatttaaacttcccttttttcagcgtcaggcccagcccgccgatcataaagagcgatcggttgtcaatgacctttttcataaaggacgccggcatgcctttgagcttcctgccgtatacgactccgacggcgttatgctcaccgagagaggcgacggttcctttaatgtcaggcttgaactcttcaagctggcctcctttaatcaaaccgcccagatttttggcgaccgtttctccttgctgcatcgcgatctgagcagtcggcgggtacggccgttccgtctcttcattgataaagagcgagctgtcgccgagaataaaaacatcatcatgacctggcgcccgaagatcagggttgaccttgacacggccgcgcatattttcaaaacccgcttcctccacgatcggatgtccgcgcacgcccgcggcccagacaacggtctgcgatttgatttcttccggctcttcatctttcttgccgactgtgacaccgtctgcgcggcattcttgaaccgcggtgccgattttaaattcaacgcctttgctctcaaggtattgaacggcgtattcgacaagctccggatcaaatcccggcaaaaccgtcggggcggcctcgacacagacgatccggacgagactttcatctatatcataatatctgcataactccggcttgcggttcgcaagttcaccgagaaattcaattcccgtaaagcccgctccgccgacaacgatggttaagcggtcagggcgtttttcggcctccgtattgtatgtcgcaaattggagctcaatatggtctttcagctggcgcgacgtattaatattcgcgatcggaaaagcgaattcttttaagcctttaatcccgaatgtttcagggacggcgccaagcccgatgacaagataatcataagggatgtccccgtgtgaaagcgtcacctttttattttgcacatctatcgctcttacggtatcctgcacaaatttgacccgtgattcattgattacatcttttatttgatatctgcagcggtcatgatgcagcgttcctgcgctcgcttcatgcatccatgtcgtttcataatgataattgtgtttattgaccaaagtaatgtcagcgtcatttgcctcgatatgcttcggaagccttgttactgtcattaatccaccataacctgcacctaaaaccacgattttgggtttattcaatgccatcacatccaccttcttttttttgctgttagacgcataatcaaatcaacatttgtattagcttcagcttattggcgggattttatgaaatgaaatataaaattttttagaaaaccgcacatgtctgcatatcaccatactatccggaagaatcagaaaacattcaggaaaaaacagattggaatttgtccccatattagcggcggccgcaacttttttcaagaatgaagcggccgggcggttttcggcactcgtcatccttttaaattgtatgttataattaataacaattttcaattaggaggcaatttggtatgcaagaggattcaaaggtttatgatattacggtcatcggcggcggcccggtcggcctgtttaccgctttttacgggggaatgagacaggcgagcgtcaaaatcattgagagcctgcctcagcttggcggccagctcagcgcgctgtaccctgaaaaatatatttatgatgtagccggattcccgaaaatccgcgcccaagaacttgtgaacaacttaaaagagcaaatggcgaagtttgatcagaccatctgcttagagcaggccgttgaatctgttgaaaaacaggcggacggtgtgtttaagcttgtcacgaattcagaaacgcattattcaaaaacggttattatcaccgcgggaaacggcgcatttaagccgagaaagcttgaactggaatcagcggaacaatatgagggcaaaaacctgcactacttcattgacgacctcaatcaattcgcaggcagacgcgttgccgttctgggcggcggcgattccgcggttgactgggcgctcatgcttgagccgatcgcgaaagaagtcagcatcatccaccgccgtgataaattccgcgcgcatgagcacagtgtcgaaaacctgcataattctaaagtcaacgtgctgacaccgtttgttcccgctgaacttgtcggtgaagaccggatcgaacagctcgttctcgaagaagtgaaaggcgaccgtaaagaaatcatcgaaattgatgacctgatcgtaaactacggctttgtttcttctctcggcccgattaaaaactggggacttgacatcgagaaaaattccatcgtcgttaaaagcacgatggaaacgaatattgaaggcttctttgccgccggagatatctgcacatatgaaggcaaagtcaagctgatcgccagcggtttcggcgaagctccgacagccgtgaacaatgcgaaggcttacatggacccgaaagcgcgcgtccagcctctgcattctacaagcatgtttgaaaaataatacaaaaaagagtctgtgtcataccggcacagactcttttttatttaaacatccaaatataattcatgacggttccgacaacgagcgcaatgacaagcgccgacacgacccaaatcgtgcctaaaataatccggtcctgaattttctgggctttcgggctgtgcccgggctgtttttgttccacaccggcccctcccttctttgcaaatctatctatcgtaacaaatgtcttacaacacccaatactactatgataaccaaactgcaaatggatgacaagctgaccgcatatgaggcggcatgaaatcatttgacattcctgacaaaacaaagtacattataaaaagacgaacattttaattttatttaattctattattcgcttttaggggtgttatatatggaaaatgtatttgattacgaagatattcagctgattcctgcaaaatgcattgtggacagccgatctgaatgtgatacatcagttacattgggcggacacacgtttaaacttccggtcgtgccggccaacatgcagacgattatagatgaaaacatcgcggcctggctcgcggaaaacgggtatttttatatcatgcaccgcttcgagccggaaaaacgcctggcttttgtccaggatatgaaagcgcgcggactgatttcttccatcagtgtcggcgtaaaggaaaatgattatgaattcatccgggagctgaaagcacaggagcttgtgccggattatattaccattgatatcgcgcacggccattccaatgccgtgatcagcatgattcaatttattaaagaacatgtcccggaaagctttgtcatcgcagggaatgtcgggacgcctgaagccgtaagggagctggaacgcgcgggcgccgacgcgacaaaagtggggatcggccccgggaaagtctgcatcaccaaaattaaaaccggcttcggaaccggcggatggcaattagccgcgcttcgctggtgcgcaaaagcggcgagcaaaccgatcattgctgacggcggcatccgcacgcacggcgatatcgcgaagtccatccgtttcggcgcgtctatggtcatgatcggatcattattcgccggccacgaagaatcaccgggacaaacgatcgaaatcgacggaaagctgtacaaagaatatttcggctccgcttccgaatttcaaaaaggcgaaaagaaaaacgtcgaaggcaaaaaaatgcatgtcgagcataaagggtctttacaggacacgctggttgaaatggagcaggatctgcaatcttccatctcttacgccggcggcaatacactcgaagccatccgcaatgtcgactacgtgatcgtaaaaaactctattttcaacggcgacagattttaacacgcagcagggccgctcaaagataaaaaaatgacattcaatatgaatgtcatttttttattaaataccgaaataaagagccgcactggccaacagattaatcacaaaaataaacaaaaagatgtaacgaatgaatttattttgcaccggtgcaaatataaagagatatagtcctgccaccccaaaagtaagaacaggaaacagccactcaaaggataaagaaatgatataaccgataatcataacaatcggcacaccgattaatgataatttacttctcatatgatttctgccccttttacttaaaaattggtgtgatgtaagcttcaataatggcagcggcgatcagcagacaaataattatgagcaccaatattccaatatgcctgaacattgaagccattatctttttttccttagaaaaacacagcctgatgaccaattcaacgcccttaaaaccaatggcgccacttaataataacgcgggaacttcaaatataccatgaggaattagcagtaaaaaaatctgataaaaaggaaccccgctatgcagattttctataatagagccgcttaaaataaacccgttggtgaataaataaaagattgaggtcaacccaaaggtaaaaaaacccgcggctaaaaacagacaagcgattgcattgtttttcagcagttcaaccgcgcctgacgagccgttgtaagacgcggttgaaacaaagtgatcggaaaaaaacgcagcgatcacaccgcctgaaaaaaacagcaatgatgcggttaacggagtggcggacgtcctgattgccggcaacatgcggttcatcatgtatagatactctcagccaatttttcaatctcttctaatgaatgctcggatgactgatactccgccgcaaaaacgccttcatgtataataccgattgtatcgcacagcgaatgcgccagctccagcaagtgagtcgataacaggaccgtatgtccctgcttgacgtactcctttaataacgtccgtatcgttttaccgctgattaaatcaatgcccgtcagcggttcgtcaagaattaatatctttggctgatgaatgagggcggccgcaattgataatttttgtttcatcccatgtgaatatgttttaatcagctgatttccgtcttgagcaagcttcagcgtctctaacatattctttatatactcatttgtccgctgagacggtacttcaaacatctccgctgtaaaacgcaagtattcgactcccgttaagtaatcatataaaaaggcatggtcgggcacaaaaccgatatcagccgatatttgccccccctcttctgaatccagttccttaccgtcaatcatgacgctgcctgaagtcggtttaagcaggcccgaaatgattttcaaagtcgttgttttcccgactccattagtccccagcaaagcataaattgagccttttttcacctcaaacgaaatatctttcaacacctgtttttcactatagtttttttgtatattcactaatttaatcattgttcgcaaacctttccgccatattgattctgcgaagaaacagaaacatgactccatagtttaatagtgtgaacaggacaaaaatacttgatgcagaatgaataagcatcgtttcaatttccggctttttatagataaaatacgacgtgatcgcagcgatttgaagcgacacaatgaaaatgaaagatccgtataagttgttatacgtctttgctttccccgcttctccaatttcgtacatatgctcccagtttttcttaggatacagggcggtgcttgaaatctggacaagactgtataaaaaacccgaacataaaaacacaataaacaagtaaatcgtcagcgcagcggaagacggaaaaaacaccgtaatcaaaatggtgatgatgaacgaatagataagagcggcgagattataaatacatactttcggaaacaccagctgccacgcatgtttgatattccggtgaaacagatgctgattttttatttccccgtcaactgacaatactgttttgagcgcatctccgacgagctgatacgaaaagttcgcaatgataaccgccgcagacacgatggcggctgccgaatacccgataaaatgatgcgacagaagcggaatacaaaaacctaaaaacagcatgaacaaatacagcatactgccgaagttcctgataaaaaacccgtcaattctcgataaaaacagcagatccttttgaaaaacggcatgaaatattttgttatttctatataatttcagctttggcgcaaaatctgcatttgtcaaaaacatataaggaataaggtccattttcctcagcgtggccgaccatagtttaaacatccccgccgttaaaaggacggcgaccgcaaacaccgcagcgaaaacgagcacggaatgtgagcggaatgctaaccatacatacggcgtattcatgaggatgttccggaaagccggtgactccgtaaagcttgaaatatcctttgcggtatactccccaaacacgagaagataaacggcatacccgactgcaagcggaaccagcaggctgacgctgaataaaatgcctttcatgattttcaagtaaaacaatttgctccacatatttgtaagaagataaacaacataagaaaacagcatagataaaaataaattgagaagaaaataaacgaagcccaagaaaaatacgatgaccgccgcagacccggtcatgcctgcgcttgataaaaacaaaaagaccggaaaaacaaaaagataccatacgaaaatggtttttttgatcgcctggccggcaaaaacagaaaacaactgtaaaaaacgcaccttttttaattgatgaatgaccttgcgcgtatcaagcagaaaggcattgtggtgttctttaaagaagccggcagcccaaaaaagctgctcaagtgaaacggcgattaaaacaaattgcccccatgcgctgaggggcagctgaatcagttttgtcccgaatacaacaccgcatcccaggaaaacgagatataaacataacagagaaataataatggcagacagcagtttgctgttgagttgaggaatgccccaatcttcctttctttttcgaaacgatgacagggtattatatttgataagagccgcaatttgtttgactatcatactttcaatccttacatatgtatttgggagagaggctctttttgcagcttgtacaaaaagagcaattatttattgatcgattttaccaagcagctgcgtattttttgccgtatttcttaatcattgtttttgctgttgcaacgattgcataagaaatcgcgcctgcgcctgtaacgataccgataagagaaatgatagaagcaattgttgatgccgcatcaataatatcaattgcttttttagctgcggctgtagagatgccgagagtagaagctaattcagcattggctgagaatgcatgagccgccgccacgtttaattcagttcccgttaataatagtgcataaaccaatgttgctgcagcaagagccgcgccaaacaaaatgaaagactttttattagattttactaagttcatcataacatctccctactctgtttttttaatttataataaaattcagcttaattgactctctcccgagctaaattttatccgccataaaatagtttaagaaaatagtaaagagttttagtaaaacaaaacatccagtcaaaatgattctcttgcctttactgagatcggtcagttttcccgcagcagcataaagagccgcgattgatatgagcagaaatggatccagcagctgcagactcaagctggtgccgccggcagaatatataagcgaggaatcagccgttaagtagttaacaactgaaagaatcaacattttaaatgccgagattaaagaagtcagcgtatatagaagcaaatatatttttttcggtttttttgtaccgagaataaaagcggcaacgaataacagaaatccgcctatcagaatttccacaaaagttgtgaagatcataaacccttgcagaaacatgacaatcgtacgaacacttttctccccgatatcgtaggtactttctccgacggaagaataatacgactgcagaactttatctgaaatactgaattggaagagtaatgaacagatcaaaatgatgaaaaaagaacttaaaaatatttttttattgctcaattgacctatcatattatcatccttttcttacaaaataaattaactattctatacttttacaatttagtttaatcctatcaaaaaatcaatatcctttcgaaaaatatgactttaggacgtgttgacaatgagcacatctttcagagttttcagttctatataccctttattttttttttgaatttgcaaatagtatgatttagacaattgatttgaagttttaggaagaacctgtcgaaagagacgaaggatataaaaaaggaggatatcgtcatgtatcctccggatgtatgatcgccaacacctgatgatcttcccattttccatttatttttacattttttctcgcaatgccttctttatgaaagccagctttttcgagcacccggattgacgccttattgtgcggcatgactccggcttctatccgatgcagtttcagctcattgaatgcataatcgactgccagcttaacagccttcgtcgcatagcctttcccgttatgtttgccatctaaaaaataaccgataaaagcgctttggagggaaccccgaaccacctgaaaaaggctgatcgtgccaatcagggtctgatcttgaagaaaaatgccgaagctgtattcagtatcattttccgcattcttcagtgattgttcaattcgttttttccggccttccagcgtataaaaatcctcttgtctcgacatggcaaaccgttcaaagaacatgcggttttccgtctgcaaaaccagttcctgctctgcatcattcaggctgagcggcctgatatcaacgctgtttccttcctgcatatgcatcgccgtccttttgttttgatcagaaacgttttttaattgcctctcacccatgtgatacggtacgctttatcgcatcaagaaaattccaagacttcacattcggctttcctttcgtgacctatgtctgatgtgagtaaccgaaacggaatcacaaggttcttttgttgacttaaaccgtgctttaagccgtatcatcatattgtgacaaggaaagaatagttttggcgggtttcccgatcatccaaaaaatatattgattggattgcagctgcaggatagaagcgggagctgaaatgttatctaagaagtatgaaacaatcggaaaagaggagttaatatgaaactgacgggaaatacaatactgattacaggcggaaatgccggaataggattggctttcgcagaacggtttttaaaagcgggaaataaagtcatcgtgaccggacggcgtgagcacgctcttcaaaaagcaaaggaaacattcccggaacttattacatatgtcagtgatttgagcattccatctgaacgtagatcactgtttgattgggtgaaaaaaaattatccggaagtgaatgtgttagtaaacaacgcggggattcaacaacgttttcatgtgctgaaagcggatgcgaaggacaattgggactatttcaataaagaaatcacaacgaacattgaagctcccttccacctgtctatgctgttcgctccgttttttgccgaaaaaaaagatgcggctgtcattaacgtctcttcgggattggcttttacaccgcttgctattgcaccgatctattcagcaacgaaagcagcgcttcattcatttacaatgagtctgagacatcagctttctgattcatctgtagaagtgattgaagttgcgcctccggcggtgaatacagatttaggcggagcagggctgcatactcaaggagaaccgctggatgaattcgctgatgggatttttaaaggactgaaagagggcaaactagaaatcggatatggttcttcagcggaacggctgcgcatgtcacgggataaagccgatgaacatacggcaaatatgtacaatgcaatgaaacatacaattgaataacatctttaaaaaagcaaaacccgcttctgttgagcgggttttatttttattaaacagataaacgcctttcttaacaatggtgcaagcgccaccgaaaagaaagacgtcatattttttcatcctaagaatggcgggttgacccttagcactcttccggcgtaccggcgtttttggccgtgcggaaagatgaaccgcagccgcaggaagcgatggcgttcgggttgtcaatggtgaaaccgccgcccatcatggactgtttgaagtcaatgatcgtgccggtcatgatatcgaggctttcgctgtcgaccaagacggtgattccgtgctgttcaaacatgctgtctttttcgcctttttcatgctcaaatcccatcccgtaagacaggccgctgcagccgccgccttttacgcccacacgaaggaacgcgttttcttcttcatgctctttcatcatatcttttatatgcaaagccgctgcttcagtgatggttactggaacactcataggtagacctccttttttaaaaacaatgctgatatctattataaaccttgaggagagtatttctcaaacgagctgtttacaaataaaagacgccgctgcatacggtttcggcgggtcccgtcatcagcacgtgcccgttgtcctgccaattaatcacaaggtcgcctcccgctaaatgaacggtgatatcccggtttcgttcggaaacaccgttcaatacggatgcgacagccgccgcacaggcgcctgttccgcaagcctgtgtaatgccggagccgcgttcccatacgcggaaatgaagttcatcggcgctgacggtttccacaaattcgacattgacgccttccggaaatctcgggtctttttcaatgacgggaccgagcgttgtaagaggcgcttgattgatatccgcaaccggaaaaacaatatgggggtttcccattgatacggctgttccggaaagctccgtttctccaaaaacaaaggtttcatcgatcgtccgttcatcttcattgccgagcatcggcagctcttttttggtgaggcgcggttcgcccatatcgacggcgacttcacgcacaatcccgttgtcctctgtaatgtctgctttcacaagacctgaaagcgtctcaatgaaaaaggacgtttcttctgtcagcttatgttcgtatgcgtactttgccacacagcgaaggccgttgccgcaatttttcccttctgagccgtcattattaaaaatccgcattttgacgggcgctttttctgacggacagatgaggatcattccgtcagagccgatgcccgtgtgaatgctggacactttaacggcaatctcagccagccgttcttccggcagctgttcttcaaattgatttacatatatataactgtttccaagaccgtgcatcttggtaaaacggaatgaattcatatcggcctccaactttttttcttttacttagtataaaagctcttctgctcggacacaatacaaatatcccccgtttttcatacataaaagctccctgcatatgcagggagcttttatcgtttactacataaacatgccggcaatcgccgcgctgagaaggtttgcgagtgttcccgcaataaccgctcttaatccgaggcgcgcaatgtccgaacggcggcttggggccaatccgcccagtgtgccgagcataatcgcaatcgaagagaaattggcaaatccgcacagcgcaaagctgataatcgtagacgtttttttagaaaagtccgcaatatgcggaccgaagtttgaataagcgacaaactcattcagcacaagtttctgtccgatatagcttcccgctccgagcgcttcatgccaaggaacgccgattacaaatgcgatcggtgaaaacacgtaaccgagaatggattctaatgtaatatgtttgaaaccgaaccagccgccgattccgccgagaattccgttcactacggcgatgagcgcgacaaacgcaagcagcatggcgccgacatttagagcaatctgcaggcccgttgacgcgccttttgccgctgcatcaatcacattagcggcgccttcgccttcttcgtccatattaaaatcgccttttatcgtctgcgttttttccgtttcaggtattaaaatttttccgaacacgagaccggcgggagccgccataaagctggccgccagcaggtattcgatcggaatgcctaacagggcgtaaccgaaaagcgtcgaacccgctacagctgaaaggccgctcgtcataatcgtaaacagctcggaacgggtcaatcccgcaatcagcggtttaatggcaagcggtgattcagactgtccgacaaaaatattcgcagccgccgcaagcgattccgttctgcttgtcccaagaagttttgacagtccgcctccgatgacgcgaaagatgagctgcatgattttcaagtgatacaaaacggcaatcagcgctgagaaaaagataatgaccggcagaacgctcagcgcgaaagccgggctgctgcccacttttaacagcgggccaaaaataaagctgatgccttcgttcgcataatcaatgagaagctgcacacggcttgagaaccataaaaatacggcccggccggcgtcccactttaatacgatgaatccgaaggccatttgtaaacataaaccgacaatgacggttcgcaggttaattttgcttttcttctctgataacaaaaaagcaatggctaatatagcaactgccccgagcagcccccaaacgatattcaatgaatccacctctaaaattttatttaaaaaaagtctttattaagataacaatatttatttttgctgtctacaaattttttattttgccgaaacccggggcgcaataaaaaagagaccccgttcggagcctctgattaaaacatcggattttcttctatgaatgtatatatgttgtcaaccaattcagcaggcgtgccccccgtgaccacttcgccgttaaccaaggcgaacagggactccatgcattttccgcagtagcttaaacagccgtactcaagcacgtccaagttcggatccttctctaagatctcaagtgcttcctgggaaccgcgcgctaaattgctgacacagaattcaatcatcggattcatgcggtttcacctcacatatgtaccttatcctaacggaatttcctctattcgtcaaagatccggtttcacgctcaatgttatcgtaacatattaattcaggttaaaggttttactattacgtgttttctggtcaatttgtaggttattttaaaactattattgtggttttagatcaaattcgttataattctagatgttattttacatagttcgttattttgtaacaacattgactaccatatttttcgggcaaaaggggaatcattatgaaaaaattggtcttgatcggcgggggttacggaaacatgagggtgctgcaccgcttactgccgaaccagcttccgtcagatatatccatcacgctgattgacagaaacccgtatcactgcttaaaaacagaatattatgcgctcgccgccggcacgatttctgatcatcatatcagggtgtcttttcctgagcatccgaatctggatgttcaatacggtgaggtggcttccgtcgacacgaaaaacaaacaggttctgtttcatgaccgcgaaccgatttcttacgatgacgcggtgatcggactgggctgcgaggataagtatcataacgtgcccggcgcgccggaacatacttacagcattcagaccattgatcagtcacgcgaggcctatcaaaagctgaacaacctcggcgccaatgcatctgtcgctatcgtcggagcgggattaagcggcgtggagcttgccagtgaattaagagagagccgtgacgatctgaagattatgttatttgaccggggcgacctgattttatcaagctttccgaaaagactcagcaagtacgttcagaaatggtttgaagaacacggcgtcaccattatcaataatgcgaatattacaaaagtggaagacgggatcgtttataatcatgatgaaggaataccggccgatgccatcgtgtggacggcgggaattcagccgaataaagccgtcagagaaatggacgctgaaaaagatccgcagggccgcatcgttttaacaccgcaccacaatcttccgggcgatgagcatgtttacgtcgtcggtgattgcgcgagcctgccgcatgcgccgagcgcccagctggctgaagcacaagcggaacaaattgtgcagatcctcctgaaacgctggaacaatgaagagctgccggaaacaatgccgcaatttaagctgaaaggcgttctcggttcactcggaaaaaaagcgggcttcggtcttgtcaacgaccgtccgctcatcgggcgtgtgccccgtttattaaaatcaggccttttatggatgtacaagcatcataacggctgataagaaaaaagccgctgattgcgatcagcggccatttttaagagcctgccacatagccgcgcttttccatttcttcatatatatcttttaaatgcggattcccttcccccacaatgacatcctccaccagcacgagcggataggaaaattcatcgtttctgatgcgctccgcaagctcttctgtctccttttgctgaggcggtgcgtcaatatcaatataccgcatgttaaaaggctgctccgggtatttccgtttcagcgccgcctccagccattcaaacgtatctttggcgctcggcatattcacgcagcttgcgcaaagcgtttcagcgccgtaaacactgagcgtaaccggctttgtcatgtacatcatcccctttacaccagtatacaaaggacggggcagcttttgtataaaaaacggtttttatgttcaagtttaaatatgctataatggagaaagcagctttgcaaaccaaacattagatttttaccgttactgtgaatataatggttttatgtatatgaaaggagcgaatctcatgactgaggttgaaatgaaagagcaagtacaggaagtattggataaattacgtccgtttctgcttcgtgacggcggtgactgtgagcttgttgatgtagacgaaggcattgtaaagcttcgcctccttggcgcatgcggcagctgcccaagttcaacgattacgctgaaagccggaatcgaacgcgcccttcttgaagaagtaccgggtgtcgttgaagtagaacaagtattttaatcataaaaccaggctgcatgacagcctggttttttattttttacaaatagtcatcaaaccatgaacaaatataacggatgcgtttcatccgctgttccggatggccgcttctcgacagctcatgcgtagctttcggaaatcggatgaacgacgtcgttttgttcagtttcttcaatgcagtaaaaagctgctccgcctgctctatcggacagcggtcatcgcgctcaccgtgcaggatcaaaagcggcgtcgaaacgcgggacgcatattttacaggagaacgatcccaaagcttatccgcttcctcaaacaaatcatgtccgagctgccagtcagtaaaaaagaaaccgatatcgctgacaccgtggaagctgaaccaatttgaaatggagcgctgcgtgacggctgctttaaaacggcctgtctgcccgacaatccaattcgtcataaaccctccgtagcttccgcccgtcacaccgagacggccgctgtcaataaacggatacgcctgaacagcttcatccaccgcctgcatgacatcacggtaatctccgcctccgtaatcacccctgacacgattgacaaaatcctgcccgtagccgtggcttcctctcgggttgacatacacgacagcatatccttgtgcggccagcacttggaattcgtgaaaatacgtatggccgtacatcatgtgaggcccgccgtgtatgtatagaatgagcggataagtttgatcctcttcaaaaacggcgggctttaaaaaccagccgtttaccgtcagcccgtcctttgtttcatattgcagcttttccggcacggatatgatgcgatcctcaataaaccgattattgtcggatgtcaattgcttctcttccccatcttcgagcgaaatgctgtaaagctcggaaggctgtgcgggtttggcaatgacagcgatacagcttttctgatcaggatgaaaagcaaaaccattcacgtactcttcttctaatcggatcggatagacgaggccgtcaatcgagatataataaataccggtgcttccctgctcgctcccgagaacgtaaaaaccctgcccgtcgtttgtccatacaggccggggcgtcacccctcctatgattgaatccgcaatcagcgcatcgctcaaatgaacatccagcatgtcggtcaggcaggagagccgctcagttttcacgtcgtacagccacgctttctctaaagtcgcattgcgaaattcattttcatggcccagcatcgcgatataagacccgtccggtgaaaacacgcaggaaccgaaagaaccgcggtgcggcgtaatctgcttcaggcttccgtccgccagattcatcagatagacatcgctcggctttccggcgtcacccggctcgcataaattggcggtaaacgcaagctgcctgccatccggtgaaaaggccgcgccataatgatccgcttcatgatccgtcagctgctgaatctcccccgtttcaagatgaatcagcacaagctgggaccagcttccgttcagcaggcctttcccgtcacgtttatatgttaatgattgaatatcaaccggctcatactcgtcatgcttctttttttctttctcatcggcgcgctccgctgatgtcagactgacggacacaagcacggatctgccgtcgggcgcccatatcggatctgatacgccccaaagaatatcggccgcctgctccgcctctccgccggcagcgtcgatgatgtacagctgagggatgccgttctccctgtcagaaacaaaggcgaggcgccgtccgtcaggtgaccaccgcggacttgtatttctgttgtccccgaaagtccacgggtttgagatgccggattctgtgtcatataccataatggctgaggaataggaatcacgcttatgattgactgttgtccggacgtaagcggctcttctgccgtcaggggcatattgcgggtctgtcacggatacgagtgacgcaatgtcctcctcggttatgagttttttcaatcgtatctcctccttttcttttttatttcgcttccctaaataaaaatccttctccagaaaaagaaagcgtccttctctgatgggaagaacgcttttttatcattatacacttttcacctgctctaaaggattccgttcaattacgcttccttctgacgggacggtaagcgccgcaatctcacagtgggggaaatgctcagaaagctgctttctcagctcttctccctttcctttttcaatcaggacaagaatcgtcggtcccgctccgctcagcgccgtcccgtaggcgcctttcatttcggccgcatgttccacctttgaaagctcaggaacaagcatggcgcggtacggctgatggaggatgtcttttctcatcattttcccggcgagcgcccagtcatttgacatgatcgcagcaacgagaaggttgctgacggcgcttgctttaacggcgtgccggtacggcagctctttcgggagcacgtctcttgcgtccctggtcagaacttcgtaaaacggaatcactgccacaacgtcgatatccgcttcggcaacacgcacgatatgtgtttcatcttcttcgtgaaggccgatcacaagccctcctgcaagggaagcagcggcattatcagggtgtccctcttcaagactcgctaagtgcagtttgtcgctttccgacagctgcaggccgcataactcatccgcaagctcaatggcggcgacgatagcggccgcgctgcttccgagaccccgtgcaagggggatgtcactccacactttgacatgggcgggcggcagctctttctgatagcggtcagccgtccgtttggcgacttggtagatgaggttgtccgttccttgagggatgcccgcgacagtttcggtttccgccgagaactgccattcatcgtttcggaaaaccgaaagcttcaaatatctgctgagcgccatcccgacggaatcaaacccaggtcctaagttggcggtgcttcccggaaccgtaatggaaaacagcatctccgcctcattcatacacgcgccgctccatttaagtattccagaatactgtcctcatctgtcggcagcgtaatcggttttatgtcagatacgtctacagccgtgttcggatctttcaggccgtttccggtcaaaactgctacaaccttgctgccttttggaatttcaccggatttcacctgtttcaaaacgccggcgatggatgcacaggagcccggttcggcaaacacgccttcttcacgggcaatcagctgataagcgtgaagaatgtcttcatctgtgacttcatcaatttttccggctgattcttccgcagcgagcacggctttgtcccagctggcaggattcccgattcggattgccgtcgcaacggtctctggatttttaatgacttcgccgcggacgatagccgcagaaccttccgcctcaaaaccgcgcatcttcggaagtccggtgccgtttttctcatgatattctttgaaccctttccagtaggccgtgatattccccgcattacctaccgggatcgccagaatgtccggcgctccgccaagctgttcgcatacttcaaaggccgctgttttttgcccttcaatccggtaagggtttactgaattcactaatgcaatcggtgatttttcgcaaatcgaccggacgatggccagcgcgtcgtcaaagtttccgtcaatcgcgatgatttccgcaccgtacatgacggcctgcgcaagttttccgaaggcgatttttccgtccgggatgatgacgatgcatttcatgccggctctcgccgcgtatgccgcagctgccgcggatgtgttccctgtagaggcgcacatgatggtatcattgccttcttctttcgctttggcgaccgccatgaccatgccgcggtctttaaaggatcccgtcggattaacgccctctgttttcacatgcagttcaattccgagcttttcggaaagtttcggcaggtgaatcagcggtgtgttgccttcatgcaatgtcagggccggcgtctgatccgtcaccggcagaaattctttatattgatggatgagtcctttccacattagctccaaccgttcccttctacgcgatatgtgctttttacttcttgtacgacttcgaggtcatttaagttttgcagaatgtcactgaaatcttcttccgatgtatgatgcgtgacgatgacgatttccgcgaggtcgtcatggcctttgatcggcagctgcagaattttttcaaagctgacgccgcgctctgagaaggccgatgtgatttttgaaaaagagccgacctggtctttgacgtgaattcttaaaaactgctgggcatagatatcagacggctgcttcagatttctttcaaactgcggggcgacaaagctgtttccgtttacgccgagacgcatgtttttcatgaccgcgaccagatcggaaacgaccgatgtcgcagtcggcatgcttccggctccggggccgtaaaacatcgtttcgccgacggcttctccgtacacgtaaacggcattaaactcgttatgcaccgcagagagcggatgatgatccggaagcagtgtcggctgaacgctgacttcgattttattgtcatcacgctgggcgatgccgatcagcttcatcgtatagccgagccgtttactgaagctgatatcttcatccgtaatccgggaaattccttttactttgacatcgtccagatcgacattcatagagaagccgagacgggctaaaatcgccatcttgcgtgcggcatcgagcccttctacatcggcggtcgggtccgcttccgcgaatccgagatcctgcgcttccttcagcacttcttcatacgggcttttttctttaatcattttcgttaagatgaagttcgtcgttccgttgacgattcccatcatttttgtgatccggtcagaagaaaggccttcttcgagcgtgcgtaaaatcgggattccgccggcgacactcgcttcataatacaagtcacagccattttcctttgcggcggctaaaagctctgacccgtatacggcgatcagatctttatttgcggtcacaacatgttttttcgctttcaaggcatcaagaagatattgcttcgtctgttcgacaccgccgatgacttcaataatcacgtcgacctcagggtcatcgatcacatcatagacttctgtcgtcagcacttctttcggcaggtctgcgtctcgttttttatcaatatctttaactagcacttttttgatcgtcaccggacagccgacctggtgcataagcttatcctgatgatcttgtataattttgacgactccgcttcccacggttcccagtcctaacagtccaatacgaatcgcttccaaagagaaactccacctttcttccttttgtccactagaaaaggacaattgttaacccttcacagacatttaagttacaaatattatataagcccgcatttgttttgacaagcggctgaatattgtttctacggctatgaaaacgcttaacacattgatatgacaagattccctattttctaaatatttttacgtcatattttcttacgaactgattccttttccgagccacgccacaggcgggacaaaaacctgcgccgacctgacattcatcatgttgtgacatgtctgtaaaaactgttcatagcgagtgcagtcggcaagaatgtagtcaagctgctcttcgtaaaactgtttttcagaatcatgagaaatgtaatagctctccaccgtctcgaagaaatggagcggaaacagcaggcggctgtaaaacaggcgtttggaaaaggaggataacggcgtaacttgctcatattcctgcagaaacaaaaatccatctttgagcaggtcgtcacgatgatacaaatatgtgctgcgcatatattccgcaatatcacgggcggcatggtcgaatacccaatcgcccggaatgcggatcaatgattcctccgaccaggtatcccgttccatccgctgatggcagattgtccccgagtcttctgcgccgggattgtcatccagctccgtatccactaaatattgaatggcgttttccgctaagcctgaataataaggaaatgcttcgatcattttcttttcgaacggttcaagcggagacatatgaattttctgcatccagaatgattccagctgatccacccgttttccccataagtccttccattggccgatcctgcccgcttctttcacttcgtacggaaaaccccgcccttttctgtgaaattcggcaagctcccctccgacagaaaacgaccggtttgagacgggaatcggcgcttttaagagcgcatacgttttgcctttgtcctcaaaggtcagttctccttccttcgtaaagataaacactgaaacgtatgggtcactttgttcttgtaaatactgactcatgtagtaaagctctgtcagctctgattgcgaaaacccggaaacgggaattataagaaagaaggaattaggcgtctggaagcattggtatttctgataaacggaaagctgtctgacgtggatgccgtatttttctttaatgatgcttttcatcataatcacctgcctgaaaaattagagctattcacatcgtagtcatacgccggcggaattatgaatacatattgtaatcctttgaatcaagtggagaaacatcgtacacatcggaagagtgttgtataaactagtaaaaaaagattgggtgaagcaaatgtcagaaaaggaacaactgaatcaggtggaagctgtcgccagggcgcgtttaaaagaacggggggttgagacggacgatattgccgagctggtgtatttccttcaaaaaaaatatcatcctgatttgacgatggaagtatgcaggctcaatgtggaccgtgtcatcgcaaaacgcgaggtgcaaaacgccattttaacgggaatagaattagatgtgctcgccgaacaaaaaaagctgtctgaaccgcttcagaccattctggcgattgatgaaagcctgtatggggttgacgaggtgctcgccttctctatcgtgaatatatacggctcgatcggctttacgaattacggctacattgacaaagaaaaacccggtattctcgggcggttaaatgataaatctactggcgaatgccatacgtttcttgatgatatcgtcggcgcaatcgcagcagcggcttcaagccggcttgctcacagcgccagaaatacagaataaggacggccgtcatggccgtccctttttttatagatgttcaatccattcggttaaagaatcaatcgcatatgtcggcttctggccgtaatctgccatatgctcacgctttgtcactccggtgtgaaccagcagcgtatccatgcccgcattgatgccggccataatatccgttgcatagttatcgccgaccatgagtgtttcggaaatatccgttccgagcacacgcatcgcctgttccataataatggattcaggcttgccgataaagacaggctcaacgcccgttgacaccgtcaaaacggatgtgagcgaaccgttccctggtaaaagtcctctttcagtcggaatggcgacgtcgccgtttgttgaaatgaaccgggcgccgtttctgatcgcaaggcatcccgttgccaacttttcatatgtaatgccgcggtcgattcccacaacgacaaagtccgcgttttcttctccgaagctcagcccgttttcttcaatggcctgacggatgccttcttcgccgatcacatacaccgacgcgtcttttttctcctgggcgatatgctgcgcagtcgccatgctcgtcgtgaagacctgctcttcagatgccggaatgtcaaagctcatcagcttgtccgccacctgcttcggcgtccgggaagaattgttcgtcacgaataaatacggaatgccgcgcgctttaagcgttctcacgaattcacacgcttcttcgattttttccgtcccgttgtacattgtgccgtccaaatctatcaaatatcctttataatccttcatactcaacactcctgtggattttctcactcgttgttatttaaatgcggaaacaggccctaattctgtttccaggtaggttcttacacgggctggaaaggctttcagcacgtccctgtttgacgtgatcagcgtaaacagctcctgatggtcggcgcgctgatattcctggacaagctgctttctggaagagatcagctgcttcagcttatttccttcatcctcagctaccaccttttcatccgtcagaatatccatgatgtcgtcataactgcccggatcgcgcatgataaagccgtcaatcatatcatttccgacatcgagtatgcattcgatcataagatggctgatccgctcaagcgcccttttttcgatctcgctctcccatgcaggcgtgctgtcaaacagcgcaagctgggtctcaaaaaaacggagtgtttgttcgatattatttctgtcaacaaaatacacgtgacagcatccccttctgcatcaattattttctgattcgttttaaaacaaaatacgcgcagccgaaattgcagtattcgtaaatgtattcgtccaatgtgctgattttcgtttcaaaggttgctttttgattctggtcatcaaagaagcctttgagccgcagctgactgtatccccagtctcccacaatgtaatcatatttatttaatatgtccgaatagcgggctttgaacgcttcttcattgaagccgtttttaaaatcgtgtacgagttcaaactcggcattttgaataagaatcatgtcttcacctcttttatcactctttactatcataattcattgacttctgtccatcaattgcaaaatgagacggttcggacggacggagaatttttcctctttatatccagtgtagcggttcagacgatccttattcaagaatgactttttccctgcaaaaacggctccatcacaaaaaacccaaaacctgcggcgttttgggttttttcggcttatcttatgcttgggcctggcgttttttagacgcttcgttcacttgttcatccgcatggtaggaagaacggacaagcgggcctgcttcacagtggctgaagcctttttgcatcgcgatttctttcagttcggcaaattcgtccggatgataatatttttggacttttaaatgttttttcgacggctgcaggtattggccgatcgccatgatgtcgacattgttcgcaagcaggtcgtccatcacttcaataatttcttccttcgtttcgccgagaccgatcataatgcttgatttcgtcgggatgtcaggctgcatttctttcgcacggcgcaagaattccaaagaacggtcatatgttgcgcgggcccggactctcggtgtcaggcggcggacggtttcaatgttgtggttcagaatatcaggacgggtatccattaatgttttcaggttgtcgtaatttccgcccatatcggatggcagcacttcaattgtcgtgaacgggctttttctgcggatcgcccggaccgtttccgcaaagacgcctgctccgccgtctttctgatcatcacgcgctacggccgtgatgacggcgtgttttaaattcatcagcgcgacggaatcagctacgcgttccggttcctgcagatccagctcagtcggcagtcccgttttgacagcgcagaagcggcatgctctcgtacagacggaaccgagaatcatgaacgtcgccgtacgtctgacagcccagcattcatggatgttcgggcattttgcttcttcacatacggtatgcagattattttcacgcattaattttttcagacccgtatagttttcattcgtgttcagctttattttgagccattccggctttctcagatgctcgtctttctttgccatttccccatcatctccattatccctttattcatgttcgtgtgcgaaaaatttctatttcacgatggatataaaacttgcggatttctattcaatagtcactttaacataggaaaaatttctcgacaagggaagagaattacttacattttctcggattgttgccgcaaactatttgtattcaatcctgaaaggagatcatgttgtgaaagttctgttatctgctcttctccttttttcagttttctgtccggctgcaagcgggaaagaacaatcggctcctgtttacggcgaacggatgcagttgtaccgcaaagccgaagcagtcacgcagattccttggtatgtgcttgcggcggttgatcaatatgaagaaaatgtccgctcgaaccgaaaggatctgccggaaaaggcgggaatcatcagcatttatattccggatcatttgtggagcggccctgaaaatccaaatcctaaggacgatgcgcccctcagcattaaagtatttgacgggatcggcctggacggcgacggcgacggaaaagccgaggtaagcaatgatgaggacattctttatacatttgcacagtatttagcgggattcggaacggatcttgaccatatccgcatcggcctctggaattattaccgccgtgatcagacggtcggcattatcaccgaattcatgacactgtttaaaacgttcggccgccttgatctcggagagcacgcctttccgcttcccgtgaagacggattacagctaccgcagcacatggggcgccgcacggggtttcggcgggcgccggattcacgaaggaacggatctgttcgctcattacgggctccccgtcagatcgacctgctacggtattgttgaaatgaagggctggaaccgtttcggcggctggagaatcggcatcagggatatcaataacacgtatcattacttcgctcacctgaacggctttgcaaaaggtgtgcataaaggccagatcgtcaaacccggagaggtgatcggctctgtcggcagttccggatacggaccgccgggcaccgcgggaaaatttccgccgcatcttcactacgggatgtataaagataacggcagatcggaatggtcttttgatccgtatccccatttaagggcatgggaacgtaaagaaatccgcaggaaaaagtaaacacacagccgccaggaaagattgcggctgtgtgtttttatttatctttcttctgtttttcattcggcagctggacggaaggcgtcacacctgacccgccgcttccgttataaaactgcggcacctctccttgaatcgctttaatggagaccggaatattatttgtcacgactgatgtcttactggcaaacggaataatgaccttcacttttatttccacaaaaatactgatatcgatcagggcattgttaatgccgtacggctttatttttgttttcacatcagttaacgcatcaccgatcaggttaaagcgcacggggattttcggcccgagatttccgagaatgctgtttcccgtgacctgccctaagggaatatcgatcataatttcatcggccgttttcgcgtctttttccgtttcatgctgcttattgttcgactccgcttccttcagatgagcctgaagctgctttgtcactttcgccttcatactgttgaccatttgtgtattaaaatccatcgttgtgacttttccgttttcatccgttttcatatcgaccatatctttcacattgtcgctgtgagacatgtattcttcaatggattccgtaatgacctctgtcgccacccgtttggtttccatttcccctatgttcatcagcaccggtttgattgaggagttgatcatccaaaggctgatgaccgtcgatatgataaaaaaagcaaacgacagaagaagcacatatcgaaaaggcaaaggccctctcttgcgaagagcgctccggtatctaggcaagaaaaatccccccttacatatcacaatgtatgcttgtaaggggggacatagtattttattttcacacttaaaaagtcccgcttaccttcactcggatgtaatggaacggccggcggattctgacattacggctgccgcgcgagcttccaggcgagcagatcccttaaaaactccggcataaagtattgcttttcttttgaatcgcggatgtaagggaacagctttccgagtgtaaacatgtcgagaacggcaaccgagtatatccgctccggatcaatctcttctccgttcactttcacattgaggagatgcgtcacaccgtcttcaagaatgccggcctctgcctccgctccggcatataccatcctgcccatcacttccccgcggaagccgaggccttttatccgcagctgctccatttgttccgaggcggcctggctgattgtttcctgaagttctctgcctgaaagacgaacggccaccggattgatcggatgaggacagatacggtgcaggtcaagctttgtgacaggccccttctgtaaaggccccaaaataacgcctgaattcaccatgctgacttcacagccgcaccagcttttcagcgcttcggctaatagaagcgggaggggcgattcctcaaaccatttcacgccggcttcttcattcagattggcgacttgttcggagagcaggttttccgcttcccgttctttctctttcagaaaagccgccgtatcttcagattccccttgccaatcagccattttctgtacagatgcctgtttgctgataatggttcgtgattcactttctatcgtcagctcgacacagccgacatagttcccgtatttttccgcacatgcaagcaatacgccgtttatgtcctgtccgtcctcaagaaggtggtgcgtatgtgattcaagaatgacatcgatgcccggaaatttttccgctgcggcccggtcatcgatcaggcctaaatgagaaagcagaatgatgatgtccgctttgcccttgatatcgtcaagtgattcttgaatgcttttttccgcatccgtcaccgtccagccgagtttttgatagacgggataatacggcaccgtgacgcccagtatgccggcggtcatcccgtttttcagcgttttgatcacgtagggctcggcccattccggccgctgtccgtccgcgtcaaacaggttggacacaatgacgggaaacgcggcatgggtatataaatccgccagctcatcgtgaggcagcgtaattccttcattattcccgacggcagccgcatcgatctcaagccggtttaacaagtcgacattcgctttgccgaaggtcgcttccgttatcatttggaatcggtccatatgatcgccgatgtcgaatacgagtgtttcctccccgtctttttcatgttcatttctcttctgctcaatataatgtacgattttcggccaattttcgaaatggctgtgcaaatcattcgtatgatataaacggagcttctctaacataccatctctcctaccttttagctgaatatcccttgataaatcaattcacagccgatcaaaatcaagacgacccgcatgaaaagcacgatcgttttcgtctgcacccgcttattaacccacgcgcccattttgccgccgaaccacgcgcccggaacgaggcacagcgcatacagccaattgacatggccctctgcgatatgtgacacggaacccgtcacggaggataagaaaataatgagcattgacgtcgccacagccactttcggcgggaacaaaaataacagcatcatggccggaaccatcagagagccgccgccaatgccgaaaagaccgcccaataaaccgacgaaaaaggcaatcacgataccggtgaaaatacggtacgaatatgtataaagctcacccgattcatcctcatatgtccggatcatgcctttatgcgctttattgaccggttttgctttcgccttcagcattaatgtaatggaaatcaaaatcataaaaagtccgaaccagacggaaaacgtatgcgcattaaaaagtttagacaaatacgcgccgatgatgcttcccgggccggaaccgataaaaaagatcagtccgcttttgtagtcaacggttttatatttcatataggccagagttgatgacaggcccgtaaaaataatcaccaaaagggacgtgccgatggcagtctgcggtgttacgtcatggaaaaacggagtcatcgtgcttaaatagagcattgccggcacgatgataattcctcccccaagcccgatcaggctgccgaccgttcccgcgataaatcccaatataatcaaaataagataagacatgtgtcttgaaacctcttttctagctgaataggtcgagctgcttcggagcaagcccggtatatgagatatttaacatttcaagcatctcaagcccgttatcggcggcgtctccgcctgagttattgttgaagagcacatacagattgcgcgactgttttttcagctcctgaagattgtttttccaatctttgagctcctgtttgttatagcggtataaatatctgacctcacgccagttttgtccgccgtctggtttgatccagccctgcttgttccgcccgtgaaaacggacaagcgttttttcttcatccgttgctttcaggacggtcggaatgctgccctcgccgatttgcggctcgtcacatatgctgtgaatccagccttcctccttcataaaggaaagcgtctgttcgtaaaatagcggagaaaaccaagaccggttgcggaattcaagcgcgcacgggatatcgcccatctgctgcctgcaccatcttaaatatgcgacgttttctttcttgcagtcaaaccacggcgggaattggaacagcaccatggcaagctttccatgctctatatacggcgataatgacagcttaaacgcctcaaacatttcttccttcgattcaaagggaatatcgccgcgctgatgacccgtcattccttgatatgccttaatgacaaattgaaaagattccggcgtctctttgacccatctttcattattgcgggcgggctgtatcgcgtaaaagctcgcgtccagctcaacgatgggaaaatgggaggaatacgcctgcagtttttgcgggcccgctgttttcggcggatagatgctgtcatgatccccccaccccgtcagtccgatataaatcacaatccttcacctctcactctagtttatcacaggtgtttttctctttctttttccatgttttttctgaatgcacttttcaggaaccggtactgatgttcattggtgtccgaaaatgcctcatctctggaagaaagaatgtgctgatagacgatcggctctgaaaactgaccgctcgtgaaatcatatatctccccgtctattcggttataaaaatgccagcttgtgccggtttttgttttgagaatgtcaccgccgtaaacatcttggatgactaaagccgttacgccgcactggcctttggccgggcaatcttccgtccattttgtactggtcttgcgcgaccaggatgccgttaatatgttcaagatttgatcatacaatgtgttttactcctttttataaaaagataccacgagacccgctttccaaacgacaaaaaaagccgattctcatcagagaatcggctcttttatttcagaaggcttcaggaatgttccgaaagccccgctctgcttacggccgccatcctgatacacacagcgtcccttgctgtaggtcgcagcaattcggtatagaaaggtgcggccttcatacaggctttgcttatgtttggaaaacatcgtttcttttgtgacggtaaaaggttccggccggacaatggcaaaatcagcgtcaaatccttcttcaagccgtcctttattcgttaacccgaagcgcttggccggtgcttcggccgtccatcgggccacatgttcaaacggaatcccatgatcgatcgctaattgaatcatgccgagaagcgtaaattggcctccgctgatcccgccccacgacaggaacatattatcctcgcgtttcaaagacggatgacagggagaatgatccgaagacaccatatcaatcaggccctctgccaaaaccccgatcaattcctctttatcagcctctgagcggagcggcggagcgcatttggcggccgccccttttttgaggaagtcttcaaagctgaataataagtagtgcggacacgtttcaacggtgacatccaatccgtcttttttcgcctgctgaatggagagcacagcccgtttcgtgctgatatgtacaaaatgaagcgcgcatcccgtcgctcttgcatattcaatcgcccgctgcacagcctcgcattcggcctcttccggacgtgaggaagcgtaagcgcgggcatcaattttcccttggagcgcgtactcggcttccaggaatcgggtgagggcgtcgctttctgcgtgcagggccaaaatcttgccgcacgccgcgatttccttcattccctttaaaagagtccgttcatcggctgattgaaattcatccgttcccgacttagacagaaacgctttaaacccgattgcccccgcttctgccatcggccggatatgttcggtatacccgggcatcaaaccgccccaaagcgcaaaatcaaccgatgacttccgttcggcgatttccgcctttgccagcaggttttcaacagttaccgtcgaagggatgcagttaagcggcatatcaaaataagccgtacagccgccggcagccagcatgtttgagccggtttcaatgccttcccattcttcgcgtccgggttcattgaaatgcacgtgacaatcgactgcgcccggaaacacatacatgccgtccgcctgcaccacttgttccgcgttttcctcaatgccgggcccgatcaaggcgattttcccgtccttgacggcgatatcagcccgctctgttccgccttttcgcacagctttcgcaccctttacaattacgtcataggccattttatcttcctccctgtaaggatgacgattttctgtcagtttttatcacaacatgcgtctatgattgccagtttactgctactatgatcgtaatacatcagcaaaaccgctataatttttgatgatttttattcatattaaccaatggttgtctttagaacctgaaaggagattgactgatgaatatttatgacgtgatgaagattcccgcttatgagcgggcaacattaatcgcaggcaaatccggcggctggagggaggtgcagcacgtcaacatgatggatgcgccggacatcgctgattttttacataaaaacgaattgctcgtcaccacggcttaccacttgaaggaccgcccgcagctgttgaaagatttgatccgcctcatggcaaaacggggctgcgcgggactggggatcaagacgaagcgttatcttaatgtcattccgaaagatgccgcggaacttgccgaccggtatgaatttccgattattgagctgccggaagacatcaggctcggagatatcgtcaacgccacactgagccatattcttgatatgcgttcaaatgagctccagcaggccatttacgcccataaaaaattcacaaaccacatcatgagcggcaaggggctgcaatccctgcttaagaagctctcagacattctccggcttcccgtgctgcttttggatcagcatacaaaactcttatcatcgtcccaccgcatacccattgacacgtctttattgaaaaacatctgttattccctttccgggccttatttcacctgcttttccatgctgtccgacagaaaggcgtattctgtcctgccgattctgaatgttgaaaaaaactgcggttatctggtgattccggagctcgtgcagaccgctgataaaggcatgattttgacaattgaacaggcggccaacgtcatttcctttgaactgctgaaagaaaatgccgtcaaacaattcggcagacgggcgcgcaatgaatttttcagcaatttcatcgaccgctcgtttaccggccatgaagaaatcaaaagccgcgccaaagaattccggctccgctgggatcagaaatacatgtgcatttgcggaaaactcgaccgaaatgagaaaacgatcagctttaccgaaaatcagctcgtttccgatcatgtatttgatctgcttgaaggggagctgtcatcctttccgtttccccctcatctctttattaaaggaaatgtcggtattcttttaattgaagcgacagacagctggaatgaaatgcacgcgtctgtcatcagctttttggagcagtttcaaaagcaggtccggacgcaatttaaacggactgtctccttcggcatctcaaacatatgccaaaagctgatcgacgtccctgacgcttttactgaagcttcagacgccatttcatccgggcatttgtccagaagcgcggagtttattcaaatctatcatgccaaagacgtgccggagctgctccgcctgcttccggcggaagatgtgaagaaattttacgaagccaccctccaaagcctggccgaccggcaaaaggaggaccagagcctgcttcatacgctgtctgtttatctggagacccactgccagatttcagaaacggctaagcgcctgtacgtccatcgaaatacggtgatctatcgtttagaaaaatgcgaggaactgctctgcaaaagcttaaaagatccggagacgacgatgcgcctgcggctcgcgctgagaatgcagcggctgatcggttaagaaatcgttagagacagggatgcgggtgttctctcgcatcctatttaagggggattgattcagcttaatcctcaaaaaatgctgccatcaacatctgcttccgttgatattatcaggctttttcgatatccgggatgtaaccgataatctcacccttttaaatcgcatcctaaactgcctcgggagcctttgtcacaagcacccatgatccttttttgatggtttcgccattcatttaaaaatcagcggggaacgacataagactcaaccacttcaccaacgccgccatgaaagtcatgttgcttttcaatttcatgagcatctttcaagaaaccttgagcggaccttctcaatttctgcaactgtcatgacatcctcgtgagcatccactgtgtccggctcataaacgataccgtaaacaagtttttgtgcgtctgcttctttcacaaggatctttacttccttgtaaaagttcggatgtttctttgatttcaaaatgagtattttctcctgttccgagtaggagaacgtccttcatatacatattttgtaaattaactttgaaggagattgatttaaagtgtattattattacccacaatatcaacttgttccaattccatgtgattaccgttactatcctcaaaaccaacctgaagactttcctgaagacacagatattagacaattttcacctaatacttttattagagcttcaatagaaggattatttcctgataaaagaagaatttacattcaagatgcttggatgcaatatggtaaccaacgagttagaataatctatgcatctggcaatgacgtgcacagtgcaactgtctcaagtgaaaaaatagaaactgatattcaataccttcatcaacatagataatcaaatctcctcatctttttgaaactctatatcaagttctataagcttttttaagtcacccccagtgtctattcgaccatttttgacccactgtgcaatgcctgcactaacaatgtcccggtatttctcttttaattgactgatgttctctaacaacaggagaaggagattttctttttcgccatcaggatagtaacttatgttcgctttttctcttgtcatgatcacgctctcgacagggagctttctctgttgtgattgaagggtgttagcagcaccctctttttatccactaaattatttcaacaataaattcaccttgattagtaatgataagtggaagctctttactttttagatatgcagcgtttttctgcatttcaaaccgcctctgtgcaaagaatagtggtccttctattctttttgtgtgttcatcatttaaccccattagaaaatcagctacagaaattatataattttgaacaatttctgaatttctcggacaagcatatttataactagctaaaagttgtactgattttcggaattcttcaatattgtttcttcgaaatcctttttcattaatagcctcacaaactgcataaatgactccataaaacatagctctgggattattccctctttgaagaaaaggtagaagagacttttcatttttttcaacaacatatttagataattctaaaatcaagtttttataatcgcccttaaagacacctgcatctacaaaagtctctttctgactccaattctgaatatactttacttgggaaatattcttttcccataagtaattcatcagttgacacaaacttatttattatttcatcccatcctgaccatgtaatattgaagtaatcaattgaaggaatatatttatcaccgtcgtaagggatcatgatgtgaacttctgtttcacctgttgtatagtgatcccaaccagcgatccatactgtccttctatatgtgtttactatagaatcaaaccctaagtttttttctttaatttcttttagacaacttatcgtttcttttagtacttctagtattttatctgtagaggtcttatatgttggactatgtttagcattattgtatagtttccttaattcatgtagtgatgcttttaaatcctcagatagcccaaattttgaaagatcattaatgaggctgaaaaaattttctctatttctcttacttttataaatagattcctttaaaaatccctcaaggactgaaccgacatcttcaatataatttaatagatctctaatagtatgatgagttgctaaggtctgaagaacttcattataaacctgtgaaacggtatcaattacaatatctattttatacctcatgttagctactctcctttaatatcaactgatctacattatattaaaatcagtcacttaaaggacagaagttctatacaatttttagccattgcaaataaatctgttccgcaatcctctttatcatgataggtgggcgctcattcaacaaacatactgtttgttagcgcccataaaatcataatccaatgagaacgactgcattaagatgatattccgttcagagatatagtagggttcaccataacgtatgaagacagagttactggccaaagcaggcggcacaagactgtttttgaccaggacagtattgaaatgactttctttcccctctgtccttttcgttatatctcctatagtgatatctgacgggcgctgcttcacccatcgcctatatgttttagagttctctgtcagctttgatccctgaccttaaccggaatggattttattatcatattttaacctccaaacaaaaaagcatcccgtttacggatgcttaccctattattgtaaatttaatagagcttctgccgcagcctatccccaacgtggatcgttaacaacagtcgtaaacactttaagcaggccactctctccaatctcatagtttaaattttgatacgtagaaatgactttctcctaaaggaaagaggaaatgctcttttcctttttcacgcggagttttggctacgatgatacattctccgttcacagcggaaaaaatctctccaaaaaaggaggggtgcttccctccgtgaatcgtaatgaagcttcgtatgttggctaatggctgtctggataatggtctcgctgtcatcttggaaagatcacttacttctataagtctttctttttaacaaaaaccgcagatatagcagcagaaataactatccgctccgcttcttatgcactctctgtaacatggagaattataaaaaggagggcgtgcggaaacatagggggagctccctgaatgggtcaattgataggcccatggataagaattaaattcttgccgctgatacaaatggaatgacgggtaataatacaacattttcaactccttttccgtacaccatattgtacttaccgacaccctttttagatgattgtctcttgcataattgtgtgttggcctaattgcgggttttaatctgcaaaattcgtgcaggggaaccatcacaaaatcacccgagagagcttttataagaccaccactccttaatgtcaccaatagaccccttctgaacagttcgtattatttcaatgacccgttttatcagaatgctctccccctgcatacgaaacagcaagttccaaacactgctttttccttctcagcattttccgctcaatgatgtccccgcctgactgccttcttttttgatcaacttccggcagatcaaattcgtcagactcgtcaagcgataaagctggttttcctttatctacatctgttccggtttccattcgcgctatgcttgagcatacggaacaactgatttccctataattccaatggcgttcgatatgattttccttctatgcgcatctctgcaatttcagagatgcgagccaaagaataaacggcaatcagcaaaaagcctccggatccccggaggcttttgattctatccttgctgcgtgaacggccgggtctgtgtctttttgccccagccaagcgcggccagaaaactgatggcgagaatggccgcccccagcatatacggaaattccatatttacatcaaagagaaaaccggcggctgacggtccggcgatattcgctaagctgatgaatgaggtgttcatcccgccggcaaacccctgctggtcaccggcgagcttcgacagcatcgtattaaccgccggccggagcagcgatgtcagcgtcaggaaaaagattgctgcggcaaaaacggcccaatatgaacccgcaaaccggcaccacacaagtcctgcagcagccccgatcaacgtcacgttaatcacgcgtttttccccgaacttgcggacgagataactgacgccgaccgcctgcacaaacacgccgatgagacccgcggccgtaataataaaggcaatatcagacgctttaaatccgtgtttatggtcaacgtaaaggccgaaaacagattcaaagttcataattccgaagttcagcacaaaaaccagaatcagcataaacgcgaacggcgatttgagcgcgcgtgacatttgcttaaacagatgctcacgtttttccgtttttgcccgggcttccagctgcttttcacgccccagcgtttcgggcagaaagaaaaatgaaagcacacttgaaaagcaggcaagacttgcagacacgatgaacggcacagacatgccgtaatgaaccaaatagcctccgacaccgggcccgatgacgacaccaagcgtcatcgccgcgctgaacagccccattcctttcccgcgttcttcttcggtcgtaatatccgcaatgtaagcgaacattgacggcattaaaaacgccgcgcccattccgcccaaaaggcgggatgcgaacaattgccagaggcttccggcaaaggcgaagatcaattgtgacacggcaaaggcggcgatgccgaaaataatcagtttccgccgtccgtatttgtcggttatttccccggcaataggcgcaaataaaagctgtgtaagccccgccgccgcaacaagcagacccatcgtgctgcccgtcgctccgaattcggtaatataagtgggcataatcggaataatcaatccgattccaagcatcgcaataaacatattcagcattaaaattgacaatcggcctatgtacgccatgatttcttaccttctccccagacaaacagatgatcattccatatttgtcattttttataccaatcagtataacgggcaaaagggaaaaaagtccagatgatttcaatctcgttttcaagtctcatgacagcacaccggtttcagccggcagatcatatatgttaagggccgcctgcagcgcttccccggctttaacggcaactccgtgtctgatcagaaccgcttcaagtccggccagcacaaacagcacattttccttcctgcagctgtagcccatcgttccgattcgccaaattttcccctgcagcggaccgaacgagctggcgatttcaattccgaattgagacaaaagcatacttctgatcgattcgccgtctgcttccggcggaatcttcacacatgtgacgacaggcagcttcgcctccggatcgccgaataaatcaaggcccatcgctgcaagtcccgccgtaagcgctttttcatgacgccgatgcctgcggaaccgttcttcaagtccttcttccaggacaaggcgcacaccctcccgcagcgcataaagcattgctgtcgcttctgtatggtgattcagccttctttcactccaataatcttcgagctggctcagatcaaaatagttgctcgtaaccggccgatgaccggacagccttttgccgtcggctgccgtcgcaatgccccgttctacctttttacgcgcggcaatgacagctgccgtccggtcattataagtaatcggcgccattccggaagggaccgacaggcatttttgcgttcccccgatgactgcgtcaatcttccattcatccgtttttacggcgcagcctccgatcgtggccacggcatccacgataaagagtgcgtcttgggcgcggcacgcttccccgatttctttcagcgggtgaatccgccccgttgatgtttctccgtgcaccatagcaacgattttcggggaaatctttttcatctcgctgataatctcttcaggccggaagaccgttccccattcacactcgatcgtatgaacgtccgcttcgtaccgctcggcgatttcagtcagcaggtatccgaagcgtccgtatatcggaacgagcacgctgtcgcccggttctatcacacttgcgagaacagcctcaatccccgctcttgatgtaccgtcaatcggataggcccagcggttttccgtttgaaacaattcacggagcatttgcatcgtttcgttcatgatgccggtaaatgccgggtcaaactggccgatgatcggagcgcccatcgccctcagcactctcggttcagcttctgtcggtcccggtgtcataatcgttctttgcggaatgcacaattcttttctggtcggcacgccgattccccctttacgttaataggcaagtttatgtaatacattcgccagcgtaaggacgccggtttcaagctgatgtacgggtgtgaattcaagcggcgagtggctgatcccgccacggctcggcacaaacagcatgcaggccggaaaggttctgccgagcatctgggcgtcatgtcccgctccgcttacgatcttctccgggttcgccccctgctcttttgcagcctctgctgcggtttgtgtcagtgtctgatccatttgaaccggctctatcctcatatattcatcaataacaggtctgactcctttgctgcggctgatgttttcaacaatcgacaccagtttctgatggaaggctgccagcacgtcttcctccgggtggcgaatatcaacggaaaactggatacggcccggaatgacattcgccatattcggctcaaccgtcattttcccgcacgtcaggcggagctcttccggctgtctttccgctgagagcatgagttcgtggatgatgctgcttcccgccgcgagcgggtctttccgccatttcattgaagtggtgccggcatggttgcattcaccgtcaagcgtaacggtatagcgtctctgtccggcaatcccggtgacaatcccgatatcccttcccgatcgttcaagcgtttgcccctgttcaatatgaatttccagaaaggcactaatatcagtgcgcagcggtgctggataacggcctgcaccgaagccgttctgccgcatggcttctttcagagaaatgccggacgcgtctttcggcgtttccgcatctgaaagcgagaaagcaccggtgatattgccggagccccaataagtgatgggaaaacggctcccttcctcttcacaaagcgacacagcctccagcgtttttttcggacgcccgcacgtctcatgcaaatgacggatcgccagcatgcccgccagcacgccgaacgcaccgtcatatttgccgccgtcaataacggtgtcaatatgcgacccggtcagaatcacctcatcaggcgattctgtgccgttcagccggccgaacacgtttccgacatcgtcaaatgccgtttccagcccgaacgcctccattttctttttgacggcaagctgggcgtccatccattctttcgtatataaaagcctcgtcactccgccggaagcggaagcgccgaattgagacagccattgtatgtcatcggaaatcccgatattcgccgccgaaagctgctgatgttccatacacgccctccttttaaactgaaaaactgacaagatgatcttcattatagaaggagcgcataacgagttcattatcatatcctctaaataatcaatgattttccggatactttgaccaataagccgaaggaaccatttttcaaaaaagatagaatattagatttattttttggataatagaggtaaaggagggcaagtcatgacaaaaaaactttggtttctgccgattgtctgcctgtttttcatttttggatgggccgcgccgtcagcctctgcgggcgcgccggctgacacgaatctgtacagccggatggcggtttcaactgccggcggcacaactctttttccgcaaactgcctcagctgtcatcactccgtctgcggatacggacacatattacaaagaagcttccggaaaaagcggaacggccttaaagagcgccctgcaccgcatcatcagcggacatacaaagctgtcttacagccaagtatggaatgcattgaaggaaactgacgaagatccggcaaacccgaacaatgtcatcttgctctacacccaggaatcacgggccaaaagtaaaaacggcggcagcgtcggggactggaaccgcgaacacgtgtgggcaaagtcacacggaaacttcggaacagctgccggcccagggacggacattcatcatctgcgccctgcagacgttcaggtgaacagtgccagaggaaatatggattttgataacggcggctcagaatacccgaaagcgccgggcaattattacgacggcgattcctgggagccgcgcgatgaggttaaaggagacgtcgcccgcatgctgttttacatggcggtgcgttatgaaggagaagacgggtatcccgaccttgagctgaatgataaaaccggaaacggctcagctccttacatgggaaaactgtccgttttgctcaaatggaatcaacaagaccccgtcgacagtaaggaaaaacggcggaacgaaatcatttacgaagactatcagcataaccgcaatccgtttatcgaccatccggaatgggcggacgaaatctggtaatcgtatcataagaagtgataagggagccccgatcatcaggctccctttttcaatatacggcgttttcagtgtcggcatcaaaaaagacggcccggttcatattgaccgcaagcagaatggcatcgccgggtttcacctgtgaagcgccgtcaagacggatcgtcatgcggtcatctccgctcaccgcatgaacgtacatctccgcgcctaagttttcacatacttccgccacagcgcggcacaccgcttcaggcgggtgctctgattgtccggcaagcgtcaaatgctccggacgcagccccgcaatcatctccttaccgctgtatcctttctgcacaagaacagccgctttttctttcggaatgggcagacgaacggacgaagcggcaaaataccattgcccgtgacttccttcaatgacgccttttataaaattcatactcggagaaccgataaaacccgccacaaacagattcgccggataatgataaatctcatgggggcttgcggcctgctgaatatctccttcattcatcacgacaatccggtcgcccattgtcatcgcttccgtctgatcatgcgtcacataaacgatggtcgctttcaaacgctgatggagcttgctgatttcggcgcgcatcgtcactcgcaatttcgcatctaagttggaaagcggctcgtccatcagaaacactttcggctcccgcacgatcgaccggccgagcgcaacccgctgccgttgcccgcctgagagagccttcggtttccgctggagcagatgcccgatttccaaaatatcggcggccgtccggactcgctctgcgatttcttttttcggcagctttctgagcttcaaaccgaacgccatattatcaaacaccgtcatgtggggatacagcgcgtaattctgaaaaaccatcgcgatatcgcgatctttcgggggcagatcgttcaccgcgtctccatcgatataaagcttcccctcagaaatgctctccagtccggcaatcattctgagtgtcgtagatttgccgcagccggagggaccgactagcaccagcagctcctcatcttttacatctaagtgaaaatccttcactgccgccgattgggcgccgtatgtttttttgatatggtcaaatgttaatgatgccattcgaaacctcctccaatactggaaaccgccacatctttctgttatgttaaaaatgttcggggtttctgacagattcataaatgaaaagcaaatttgtattataacgtcataatacatataatagtactactacttgacaaaggaggtccgtcccattgttaaataacgggagctcgaaacctttatatattcagctgaaacaaattatcgcggacgatatcaagaagggcgtttattcgccgtccgtgaaactgccgaccgaaaatgagctgtgcgaaacgtacaacgtcagccgcataacggtcaggaaggccatccttgatcttgtggaagaaggctggctcgtccggcagcagggaaagggaacgttcgttaaaagccctaaactgaagcgggagctcatcgcggtcaacggctactctgaatttatggaatcaacggggaaaaaaccgaaacaccagatcctttcccatgaaatcattgaagcgcctaaatccatcgcccaaaaacttcgcgtcgcttccgaaagtcccgttcttgaattaaaacgcattttatttcacgacgaccagccgctctcattcgaaatcgcccactatccgctcagtttatttcccgacatcggcaagcatattaaaggcggcgtgtcgatgcatgacattttgaaacagcactatcaggtggtgcccacccataatacgaagctgttaaatgtcgtatacgccaagcaggaagaaagccgctatctggcttgtgatatcggggatgcgctttttgaaattgacaaaaccgcatttatgtcaaaagacaagccgatatacagctcgctgtttttaatgcataccgaccgcgtcacgtttaccattaacagtccctatgcgtaacaagtataaaaaacgagacaatgcttatcgtattctcgttttttcactgcttttcccgccgcccggcctgtagggatgcccgtaaccgaacgctccgaaccctccgcatgttttggcagccgtcccggcgcccgcagtaagcgctcgccgaatatcctgatgctcgaagaaatcggtaagaaacccggcgataaaagaatcacccgcgcccaatgtatctattatatcagctcttaccaccggctgatgatagacgcgttccccatccgataacaccgcgccatattctccccttgtcagacagacgattttcgctccgaaaccgcgggctttttcggcaagccgcatacattcactttcactcaaatcactcccggaaaaaaacgcatacgtcacgtacggacagaccgcttctaaataggcttcgtcacgttttacagagaagtcaaaggaaatcggcacatggccgctcagcatcgggaggtcacgttctatcctgctgtatacgctcgtatgcagcaaatcatgtccggcgataaatgagatgtcattctcctgaaaagcgagcgtcagacgagattgcacgccgcctttatttgatccggcaaatatcctgtcccctctttcatcaagcgtgacgaccgccatcccgttttctccgtatgcccggcggatcagatcggcattcaccttttccagtttcagcacattcaatacgtgatccgccgcttcatcactgccgagaatcccgatataagaagtttcgtggcctaagcgccgggcaagcacggctacgtttaacgcatttccgcccgggtaaaacgtctcctgatcctgataataatctactacattatctccggccgctatcagtttcatcttttcatcctccttatccttttacgcttcccgctgcaatgccgcggataaaatatctctgcatcaataaaaacagcgcgatgatcggagcagcagaaatcgtcagcccggccagcagcacgccccaatccgtctgcagcgcatctctgaactgcatcagcccggccggaatcgtccgtaaattttcatcatcgataaaaataatcgcaaacataaactcattccatgtatggtaagccgtcaaaatgcctgatgtcaccagaatcggcacgctcataggtaagaatattctgaaaaatattccgaaacttgtacatccatccagataggcagcttcctcaagctctttggaaatcgacaaaaaataggaacggatcagaatcacggtaaacggaatacggtaggcggcgtacggaagaatcaatgcccaatacgtattgtacagtcccaatgactggataatggagtacagcggcacaagactgacctgcggcgtcagcatcaagccgccaagacaaatgatcagcacaaacccttttcctttaaattgaaaacgggccagcccgtatgccgcccaggcgctcacaaatacggtgatgagacaagtcagcacggtcacaatgacgctgttcataaaataagcggaaatcccttggttccatgcggatacgaagttttcgggatgccagacagagggcagcgaccagctgtgctcaaaaatctcatccgagcttttaaaggcgctgaccgccatccataacagcggataagcaacggcaatgaggtagattaagagaaacagccacacagacgtttccccgacataccattttctcggttttccgcctgttctgacggcctgacgggcatgacgcaagtccgtcttttcaggaagcatcggctactcctcctttccggtcttaaagaatttcatctgaataagcgacagagcaagcgtcagcaaaagcaccaccgtcgcgatcgcagaagcgtagcccatcatatcctttgtaaaagcgctcttatacaaaaatgtgctcagcacttctgaagcattgcccggccctccgccggtcagaatatacggttcattaaatacggtaaatgcgccggtcagcgtcatcaccacggcaacaaacgacatttctttcgtctgcggcaccgtaatgtgaaaaaactgctggatttttccggctccgtccagctgcgccgattcatataattcagcgggaatgctctgaatcgagacaatgtacagcatggcgatgtaaccgacagactgccattgagacacaaaaatgacagacagcatagcggtgttttcatcgcccagccacgcccgggtcagttcatcaagtccgacggcttccagcagctgattcaagagaccgatttccgggttataaataaaatcaaacaacagcgcaataacggtcatggaaatgacaaccggaagaaaaaagaccgtgcggaaaaacggcgaccattttcttaccaatctgtcttccagcatggccgccagaattaagccgccgccaacctggcaaatcagcgatatgaccgcatacagcacattgttgcggagtgctgtaaaaaacacgggatcgtgaaacaggtcaatataatttttcaaaccgataaacgtcttttcgggttgaaatgagctccattcaaacagactgaaaaacacattctcaataatcggaatgtaaacgaacagcagaaaaatcagcgcgggcgcgagaaacagatacggaatgaaacgttttcggctgaccaaggaaatcctcatctcctttctccaaagaaatctgttctattcagatgacgctctgacctgacgcgccgctttctgcacggaattcatcacctcgcgcggtgtcattgtgccgccgagcatctgctgaacgcctgccgcatacacatcggcgatttcaacgtcaacgtccatatcaaaccacggcaccattgattcggcgcggacgatatcctgcacggcttcgcgctggatcggggtggaattgttttctgtcgccgttccttgaaccgcgctgtatttaccgacgtcttttatcagcttctctcccatttttttcgaggttaaaaactgaagaaattccatggcttctttcgggtgcttcgtttttgaggaaatcataaatccttccggagatccggtcagtgcacggggagatcccttttcgccgctgattttcgggaaaggaaacaagcccagattgaccggttcgacgagcttaatttctgccgtttccgcataaatcatcgccgctttgccgcttgtaaactgctggcgcacgtattcgtgatcaacggagttcacgtgctttgtaaagtacggcagaagttcctgaagcttttcaagcgctttgacatagccttcgtccgtaaactccccggtttccgggctgtaatccttcgcccgcgttttttcatccaccatacgctggttcagcgtcccgatataatgagaaatcgtccaaggcgcttttgtgccgaaactgatcggaatatatccgttctctttcaatttctcagagactgtgatcagttcatcccatgtcgccgggggcttcaaatgtaatgtatgaaaaatgtccttattataaaagaatgatttagcgtccatttgccacggaacgccgtactgttttccgtcatgcgtaaagggtttgatttgtgactgcacaagctgtgaggaccaatctttatcctgctgatagtaagacgacagatcgagggctttatctcctttgatgaatttataagcaaaccggtcgctccatgaaaagaaaatatcaggggggctcgttgttccgagcatgactttcaccttgtctttataagaatcgtttaagaccgcttccgtttggatatgaatatccggatgagcggcttcaaattctttgaccgcttcttcaaaatagcttttttccggctccttcggccacctgtgaaaaaacttcaaggtcacttttccgtcagaggaactgctttggcttgaacaggcggcggctgacagacatacggctaacagaacgaacaggcagatgagctttttcagatgcttttcctcctttgtcaccggactataacgttatatatcattatagtccggtgaaatataatgcgcgttcttaatattcgactttccacatgtaacgcctctggcttaacggatggttccttgcttccgccagcgcatccgcatagcttctgagcacccggtttaatacgagaggagccagatagccttttacagaatcgtcaattccggaaaaatcatatgctgccgcatcaagcacagtcagttttttgccgtatctttttgagaaggaaagcgcccgctcttcaaggggtcttgtttcgtctaagccgagcaggataataaatggaacggattcatcaatgatttcgaacggtccgtgaaaatattctccggcatgaatggcgtgggaatgaatccattgcatttccatgagaatgcagatgctgtaggagtaagcgacgccgtagttcgcaccgcttgccatcgtgtaaatgatatcttctttttcgtgggctttcgcgaatgcctttgcgtgatccgcttcttgtttaagcgctttgtcatatacggtctggagcttattgagtccgtcgatcgcctgctcaaacgcgggatggttttccagcacgtgtaaagcgccgaacacgatttgatacagaaccccgtaattcgtatttatcgcctgtgcattctcaccccagtcatacaccgcgacatattcggcttctttcgctagcggcgaatcaggctcaaaggtcatcgcaatcgtaagcgcgcctttttttctggcgaaaccggcggctttcaccgtttccggcgtattgcctgactgagaacataaaatcacgagagagttctctccgagctgaacgggattgcgctgaataaattcatttgaactgtagagatcagagctgatggctttcgcctctctgtcaaacacgtacttgctcggatacataatggctgaagaacccccgcaagcgacgaaaaagacgtggtcaatcgtttttcctttcagatcatccaagaaagcctgaactttgtgattcacttgtgcggcagtttgactcaaatccttcactcctcagtgttttattatataacgttatataacattatataacgttatattaatcgcaacaaaggtgcgttgtcaatcatattttctgaaatttctaaaatataaaataaacccgtcttatttcccgccctctcttgacctgacccttagagacacgtttagaatgaaaagcagggagtgattcagaatgaatataaaagaagccgcaaggcagacgggtctcacgaaaaaagccatcaaatattatgagcaggaaggtttaatcaccgtcagcaaaaaccctgataacggataccgtgagtattccgctcagaacgtgaatacgctgaaaatgattgccgccctccgaatgctggcactgtctgtaagcgatattaaagcgttcctcttagagggcagcagtctgcatgatatactgcgccggcagcatcaaaagctcagccggcagattgaagagcttgagcaggaacggaaactgactgaaatgctgatcaagcgcgtggaagatgcggaaaatgtcgattcaattctgcatgatatcggcgaggtcaaaatagatgaaccgaagtatatgggacttcagctgaaaaaactgttcccgggagatttcggagaatttatcgccgcgctgtttgaaccgttcctcgacttttctattgatacagatgagaaaaaaacgatatgggcggagcttattaaagtattggatgatatggaagaagttccggctgcacacccgatgatgcagctggtcggcaaggaggatccggctcagctccagcagcacaaagtccagcatgaccaatttatcgagcggattttggagagagaccccgccacttgggacactcataaaaacatcatcattcagcttgtgaaaagagtgcagacagatgaagaatacagggaaagcctgatcaaggtcggagaatccgcttctgatctgcccgcgctgaaggagggatcgcctttcagcaatcttcttcaaaagctcagccccaaatatgacacgtatgtgcgatttcagcttgaactgaaaaaagaagccgacgaggaactcggctttgattcagaagcatatttaaaagagatgcttcaatcaaaaaaacgctaaggttcgtttccttagcgttttctttcttcagcctcagtgctgcgcgttaatgcggtcaacgacattagcgatgagctgctcttttcctaagtcggaatcttcgtcaacgcttgctactgtcaaaatgatggccgctaccgcaagagcgatcgtctcaatggcggccgccgcgtttaaaaatacctatacagccgttgcgcattggccgatggccgttgattttcctttgtccatgctctttttgtcaaactcttctttcagcactttcgccataatctgcgaaccttgatcaatgacgctgttcactttctcataatcgccgctgtagaccgccgctttcaactctttaaaataatcccgcgatgactttttaatatcagcgatcacctgatcggaaacacccataagataaatactgaaactaatgaaatttttaacactaaaaaaagggagtgttcatatgtttttaatgaatgataaagtgctgtggggtgctgtagttctcgcctttattctgtcgattgtgttttatccgtttcttcctgctgatatggccattcactatgacgtgtcgaaccgtccgaatacatcaatcaataaaacggccggcgtcctgatttttcccgtgctcatgatgatctgcatgttattcagaaaaaaggtcgtccagctgttcctcatcgtttactgtctgctgatcgtgcatattgccgtgatgtggctggcactgtaaacataaagaaaaccggagcccttaagctccggtttttcttatttataaaatactttctcaatgttgtatttcgactgaagggtattgatcgcgtacgtttcgtaaatctccctttccatcggatcatttacgacacatacttcaattttatacacttcgtccctgtgatgtttaacaggcgacacattgtcttcaaaatgctttttgattctttgtcttaatttacgggctttcccgacaaacagcagctcatcatgaatgttataaaacataaagatgccgcctttgtctctcggaatttggtgaaaatcaatgaaaccgtaaatcgctttaatcgccggttcattctccgacggtgactgctgccgttccgtaatggttacatcaggagcaggaaggtttatttttatcaaatgggtcacgtcctcttattcattaaagctccatcctatcataagaatgcgccaaaagctattttttattcaagcgccccggacggatcataaaggcttacatcaatttccgtctgctgcccgagcgcgagtttcgccagttcagcccccagatacggcccgctcgtcagccctgaggcgcccagcccgttggcaacgaggagtccgctgatattcggcactttgccgatgacgggaagaaaaccgggagtaaacggcctgaaaccgactcttgtctctatcatagtactgtctgaaagccccggcgccacggttaatgctttgtcaaaaatctcgcggagaccgccggccgtcacccgcaaatccatgccggtatcgttttcatgagtcgcgcccgctatgattctgccgctgtcaaaggcgagaatgtattgatcgtttggaggcatgacgacgggccagccgcccgtctcctctccctgaagctctaaatgaacgatctgtgccttttggtatgatactgaaaagcggatgccgagcggctcaagcagctctctcgcccaagcgccggccgttacgagaacctggtcggcagtaagcgtgcgttctgcggttttcacaccgatgacggcaccgtcctctgtcaatattgacgcttcttcattgtaaacaatcgcgccgtgcttaacggccgcgtttaacagcgccttacgaagcgccctcccgttcacccgggccgcgccgctgacatgaaccgccccgtattcctccgacagcgcggggaacagcgccttcgtttcttccggagtcagtcttgtaatgtcaccgatttcaggggcgtcctctcttcttttataagctctttcctccatttggctgagttttttttcatccgtatggaggctgacagcaccgaccttttgataaccggtttctgtttctccatcagcttcaagctgctgtatcaattggttataatagcgggctccgccttttgcgatcgcataccatgcttgattgcggcgctgcgacagccacgggcagacgatccccgccgcggcgtcagtcgcctgccccgggtgtttccgatcaatgaccgttacatccgcaccggcctttgcgagatgataagccgcggacgcaccgagaatgccggctccgataattatataagacttcatgtgtaacaccttttctatctgttttgtcttatttattttaacaaatggagcgcccggttcctaccggagtcctgacagcgacaatgagttttgaaaacggaaacgtataataaaaggaatacgttcttgtgtgaaagccgttttcctcaagaattgctctgtattgtgatgtattttttatatctgacacggccaatgtgccgccaggcttcagcaccctcaccatttccgcaatcgcccgttccctctcttttctgcctgaaatgttgtgtacggtaaaatgcgaaatgacaaggtcaaacgttttatcaggaaacggcatggcttgcgcgagcccgtcatacaaatcaattttccgcgctccttctgcccgtctgttcttttcgaatgcgtctctcccgtttccgcccagatcccagcttgaccatttgtcaatcgctgagacgtcagcgcctttttgagccgcggcgatcgctaacagcccccgtcccgttccaatatcaagcaccttcatgtccggctttaaaccggaaagcgcaagaatgcgatggcggtgtaaaagtttaatggccgttgaatacaagagcatccaaagaccgagcaataaaaacaaggtgcccgtcagccagccccagtaaggaggaatcataccgcataacgtggctgcagcataaaggagcgcaagaaagataaatccaaacgctccataaggcgcatcaattccgtatcgtgttgtcatactgtcaagtcctttcaatatttatccaactattataccataatattcaaaagccgaaaggagatacgaccatgtgaaacgcggcattacatttaacatcccaaatcaattcggacggtttgcggcagatatattacaaccgttccccatctcttcctatacgtggtttatcggtgatggagaggcgtatactgaattcaaagaagacaccgatacagacctgtttccgcaaaatcagcgcatcattcagggtcaagaactccgtcagcgtctggaaggaaacccttattatatgatttttgctgaattgaaagctttcccgggcgggatggtaacggaaatcagtacgtacgaggagtatttggagagttcctgtgagcttgtgcttctcattgcagattgctcgtatgtaacgttatattgcaaagatccggatatgctcgaagccctttatcagcaggctgtacaatgcgggtttcaccgcgttgactatgttacagatgagaatgacgcgagaacgggattgtctgtctgatgaaggtgcgttctttttatgaagcacctgatagggcttaggattcaaaatattgacaaattcgtgtgttttaacaaaaaaacaaccccctcatgtatactgagtgcgtaacttacatatgaaaggggtatggcaatgaaaatcagcttgaagaaaaaagcagatttttggaagaagacggcggtttcgtcacttattttcaccatgttttttaccctgatgatgagcggtacggtttttgcggccgggctgaataaggatcagaagcgccgggcggaacagctgaccagcatctttgaaaacggaaagacggaaatccaatacggatatgttgaagcgttggatgacggaagaggttacacttgcgggcgggccggctttacgacggctaccggagatgcgctggaagtagtcgaagtatacacgaaagcggtgccgaataacaaattgaaaaagtatttgcctgaattgcggcgtcttgcgaaggacgaaagcgatgacatcagcaatctgaaaggattcgattctgcctggcgctcacttggcaatgataaagccttccgcgctgcccaggataaggtaaatgacagcttgtattatcagccggcgatgaaacgttcagaaaatgccggactgaaaacggccttggcaaaagcagtgatgtacgatacggtgattcagcatggcgacggggatgatccagactccttttatgccctgattaaacgcacgaacaaaaaaatgggcgggtcaccgaaagacggaactgacgagaagaaatggctcaataaattcttggatgtgcgctatgacgatctgatgaatccgtcagatgaggacacccaggatgaatggagagaatcggttgcccgtgtcgacgtttttcgcgatattgtcaaagagaagaactacaatttaaacgggccgattcatgtccggtcaagcgaatacggtaatttcactattcaataaacaaaaaaaccccgccatatggcggggttttactattaaccgatggagccttccatttcgaacttaatcaaacggttcatttcaactgcgtattccatcggaagttcttttgtgaatggttcgatgaagcccataacgatcatttctgttgcttcttcttcagaaataccgcggctcatcaagtagaaaagctgttcttcagaaacttttgatactttcgcttcgtgctccaatgaaatgttgtcgttcaggatttcattgtaagggattgtatcagaagtcgatttgttatccataatgagcgtatcacactcgatgtttgaacgggcgccgtccgcttttcgtccgaagtggacgataccgcggtatgttacttttccgccctgtttagaaatcgattttgatacgattgtggatgacgtattcggtgcaaggtgaatcattttcgcgcctgcgtcctgatgctgtcctttacccgcaagagcgatagaaagcgtcatgccgcgcgcgccttcacctttcagaatgacagccggatatttcatcgtcaatttagaaccgatgtttccgtcaacccattccatcgtcgcgttttcttcacaaaccgtacgtttcgttactaggttgtaaacgttgttcgcccagttttgaattgttgtataacggcagtagccgccttttttgacgatgatttcaacaaccgcgctgtgaagcgagtttgttgtgtacacaggagccgtacagccctctacgtaatgaacgcttgcttcttcgtcaacgatgatcagcgtacgttcgaactgacccatgttttcagagttgatgcggaagtaagcttgaagcggtgtttcaaccttcacgcctttaggcacgtagatgaaagatccgccggaccaaacagctgagttcagcgccgcaaacttgttatcagtcggcggaatgactttcgcccagtgctcgcggaaaatgtcttcattttctttcagcgcgctgtctgtgtctttgaagacgatgccttgctcttcaagatcttctttcatattgtggtaaacaacttcggattcgtactgtgcagaaacaccagcaaggtatttttgctcagcttcaggaataccgagtttgtcgaatgtctgtttaatttcctcaggcacttcatcccaagaacgctctgaacgctcagacggctttacgtaatacgtaatttcgtcaaagtttaaagagtttaaatccccgccccactgcggcatcggcatgttgtagaaatgctcaagagatttcaggcggaaatcaagcatccattgaggctcttctttcatgcgtgaaatttcttctacgatttcttttgtcaatccgcgctctgaacggaaaatggaaacgtccttatcgtgaaaaccgtacttgtattcaccaatttcaggcatttttttagccatccattttcactccaatcttttaattgccgcctttttcgccagcgactcctttttcaagtgctttccatgaaagggtggcacatttaatccgggccgggaatttcgaaacgccttgaagagcttcaatatccccgagatctatcgagtcgtcatactctttcccttgcatcatgtctgagaaaatcttagacatggaaagggcggtatcaatatcttttcctttaatcgcctgcgtcatcatggaagctgaagccatggagatagaacagccttccccttcaaacttcgcttcctgaacggtatcgccgtcaagcttcattgtcagtctgatccggtcgccgcaagtcgggttgttcatatcgacgacgatgctgtcatccaaaacccctttgttgcgcggatttttgtaatgatccatgatcacttgtctgtataatgtatctaaatttgcattaaaagacatttgtaaagtactcctttgtcttttggagggcttccgcgagcttatcgatctcttcctctgtattatacaggtaaaaactcgctctcgcagtagcagatacatccagccatttcatgagcggctgggcgcaatgatgtccggctctgaccgcaatgccctcagcatcgaggacagtcgcgacatcatgagggtgaacctcatcaagattaaatgtcacaagtcccgcccgctctttcggaccgtataccgtcacgccgtctagctgctcgaaacggtcaagcgcataggctgcaagcttatgctcatgccgggaaatctcgtcgagtccgatctcttcaagaaaatcaatcgcggctcccaatccgatcgcgcctgcgataatcggcgtgcctgcttcaaatttccacggaagctctttccaagttgattcataaagccctacaaagtcgatcatctcgccgccaaattcggccggctccatattctcaagcagttctttcttgccgtacagcacgccgattcccgtcgggccgcacattttatgggaagaaagcgcgaagaagtcgcaatccaagtcctgaacgtcgattttcatgtgcggtgtgctttgcgccccgtctaccacgatgaccgcgccattgtcatgagcgattttggcgatctctttaatcgggttgatcgtgccgagcacgtttgacacatgagcgactgccacgatcttcgtatggcttgtgacagtctgccggacgtcgtctaacgaaagcgtgccgtcttcctgcatcgggatatattttaaagtcgcgccggttgcttttactgcctgctgccacggaatgatattcgcatgatgctccatttgggtgatgaccacttcatcaccgggttttaagctggcgcgggcatagctcagcgccaccatattcagtgaagttgtcgtgccttttgtgaaaatgacctcagccattgatttcgcattgataaacttacggactttttcacgcgcaccttcatagccgtctgtcgctctcgtgccaagagtatgaacgcctctgtggacattggaattgtatttgctgtaatactgatccactgcttcaatgacagcacgcggcttctgagaagtcgccgcgctgtcaaggtacacgaggtcatgtccgttcacttgctgatgaaggatcgggaactgttcacgaatatcggtgatattcattattttactttcctttcgatgacggagacgagctgtttcttaactccttcaatcggaagctcttttaccaccggagcaaggaatccgtaaatgactaagcgctccgcttcttctttcggaattccgcggctcattaagtagtaaagctggatcgggtccacacggccgacagatgccgcatgtcctgcagttacatcgtcttcatcaattaaaagaatcgggtttgcatctccgcgtgctttttcactcagcatcagaacgcgggattcctgttcagcgtttgctttagacgcgccgtgctcgattttgccgattccgttaaagatggaagatgcggcatctttcatgactccatgcttcaggatatagccttcagaagccttaccgaagtggatgatctgcgtcgtaaagttttccgtctgttctcctcttccgacaactacggttttcgtatcgccgtatgtgccgtctccgtagaggtttgtcgtgttttcagaaatcgtgtcgccgtcgttcatcagtccgagcgcccactcgattctgctgtcgcgtccgcgcgcggctccgcggcggttgacgtatgttgtgacgcctgctgacaggttgtcaacggcgccgtacgtcacgctggcattatcacctgtgaccacttcactgataatgttgaatacagcttctttcggattcaccgtgctgatgtagttctcaacgtaagtgacggagctgtggtcttcagcgacgatcagcacgtggttgaacaatgccgtgtcattgctttcatgaacgtaaacggcctgaacaggcgtctccacctgaacgtttttaggaacataaaggaatgccccgccgttcattaatgctgcatgaagcgcagtcagtttatgttcgtcgaccttaacgccgtctttcatgaaatacttctcaacgaggtcgctgtgctcacgggcagccgttaagatgtccgtaaagatgacgcctttgtctttcagttctttggaaagagaaaggaaagcgggcgtttggtcacgctgcacatataacgttttgtcttcgttttcgatatcgatcagcgcttttgcttcatcagctaaatcttctaaagaagcaagcggcgcattttctactgtatgcttgttgaactttgtaaagttccaatttgtgatttttgttttatcaggcttaggcagcggcagatcgtcagctttttcaagagcctgtaagcgcaggtttttcagccaggcaggttcttgatgcttttcggaaaagcctttgacatattcctgatctacggatagtttcgtttccaatgtcatgattatccccctaacgcttacgcttcttggcctacagtttcgtcttcaatgcctagttcttgtttaatccagtcataaccttccgcttcaaggcgctgtgcaagctccgcgccgccggatttcactacgcgtccctgcatcataacgtgaacgacatcaggcgtgatgtagttcagaaggcgctggtagtgagtgatcattaagcaaccgaagttttcgctgcgcattctgttgattcctttagaaacgactttaagcgcatcgatatcaagacctgaatcgatctcgtcaagaatggcgattttcggctcgatcatcataagctgaaggatttcgttgcgttttttctccccgcctgagaaaccttcgttcaggtaacgctgcgccatttcagggtccatttcaaggaactccatgttttcgtccattttgcggatgaatttcataagagaaatttcatcgccttcttcacggcgtgcgttaatcgcagagcgaaggaaatcggcatttgtcacaccgctgatttcgcttgggtactgcatcgccaggaaaagacccgcctgagcgcgctcgtccacttccatttccagtacatccttgccgtcaagcgtgatgctgccttttgtaacttcgtatttcgggtgtcccataatcgctgctgagagcgtggatttaccggtaccgttcggccccatgacagcgtggaattcgccgccttttatttcaaggtttacaccttttaagatctcttttccttcgatttcaacgtgaagatccttgatcgttaatgttgaagcagccatatctatacctccaaaatatataatcattattctcaatttattctcattctaattttataacaaatgaaaagtaaatacaactttttatattacccggaacattcctaaagtttatcaaagatcaaggcgtaattaaagctgtttgaaacagaaaaagggcggaaatccacccttttttactgaccgattttctcattaagctgcgctgcgaggaacttgcttttttgatattcaagctccctctgccgttcgacttccatcctttttgaaagacgccgtccgtattcctcgtagccgatgccgtgtgacttctgcatcgctttttccatttcaggcgtatagtcaaggtccagtctctcgtggctggtgcagataatgaatcaatcccttcatctatttgtttctattgtaacaatgatccgctgctccggccaaagagagtgtgcccctgaatcctttcgaatgtgccggaatccggcgctcgctttatctgaaaaacggtattcacacgattgctctttctaatgcgtcgtatgtccgaattcctgaatgcactgctgcacgagggtcactccctgactgagagccgcgccgcccccgaatgccgccgcgacgccgatgacctcaaggatgttttcttctgtcgccccttggtcaaggcagcccttcgtatgataaatcatgcaaaattcatcttgagcgctgatgctgatgcccagagcgattaattgtttctctttttcagttaatgaatccgctgagaaacactgttcagtaaattcattaaacttccgccccatcatcggcattttttgctcgaatatgcctaaaccttctttatattgtttcaatgcgtcatgcacgcttttgccgttatcctggtattgagccactgccattccctccaataagttaaccttcctttttattatggacagttctccgattaatacccgaaaaaaaccccggatgattcatccggggttttcgttttattcagatacgggaagcacggctccgtcgtattttttctcaataaagtctttgattttcttagagtgaagcacttccataagcgctttgattttctctgatttttcgtcacctttgcgtacggcgatgatgtttgcgtacgggttgtttttcgttgattccacttgaatcgcatcttttaacggattcagtttgttttgaatcgcatagttgacgttaatgaagactgcatcgccttcttcttcattatatgctttcgccgttaattcaggggcgatttttttgaatgtcaggtttttcgggtttttcgtaatgtttttcgtagtggcttcaatcgcttttaccttcggatcaagtgtgatcagtccggctttttcaagcatcgccagcatacggccttgttcagcgacattgttagtcatgatgatggtcgcgcctttaggcaggtctttcagtgatttgtattttttcgtgtaaattccgaatggctcaaggtgaacggctccggcattcacgagtttgtaatctttattttctttcatttcctgttcaaggtaaggaacatgctggaagtagttcgcatccacttcattatcagctaacgctttgttgtacattttgtaatcgttcagcacttttacttttaatgtgtagcctttttccttcaagagcggttccgcttcttttaagatttcagcatgcggtgtttttgtcgcggcgacgacgatttcctttttatttgagccgtttgatccgcaggccgccaaaactcccgcgaacacaagcagcagcgcacttaatacaatctttttcactgtaaatcctcccttatcttttgtctattatatttgtaattacatcaccgataatctgaatgataaagacgatgatgagtataaatactgtcgctacaaacgttacatccgtattattggactggtagccttccacatatgcaaggtttccgagtccgcctgaaccgatggcgccggcaatggcggtagatccgatcagggcgatggccgtaacggtgatgcctgaaattaacgcaggcattgattcaggaatcagcactttgaagataatcgtcgatgtcttcgctcccattgatctggcagcttcgatgactcctttatcgacttcccgcagcgcaatttccgcaagacgggcgtaaaacggcgcggagccgataatcagcgccggcaatgcggcgttcggtcctaaaatcgatccgaccaaaatcttagtgaagccgagaagcagaataattaaaataagaaacggaatagacctgaaaatattaacgaccgccgcaatcacggtgttaatgattttattttcccataagcttcccttacccgttaaaaagagcagaagaccgagaatcgctccgatgacaaatgaaaaaactaatgcgatgaccgtcatataaagggtctcgtatgtggccgtccacagctcggttatatcaacgttcgggaaccatttttcaaacatttgtgatcacctctgcttctacctgtttgtctttgatgaaccggatcacgttttctacttctttttcctgaccgtcaatatgaatgaataaagaaccgtaggctccgtccttcgtctgtgaaattttcccctgcagaatattgacgtccacatcaaagtttcggatcatttccgtaatgaggggctgctcggcggcctgcccgacaaatgaaagctgaatcgtttttcctgtcgctgtttcctgcagaaaatgctggatggtttctttcgtctcctccggttctgtcacctgctgaacgaaacgcttggtcatcggttcgcgcgggtttctgaaaacttggagtacttcgccttcttcaacgactttcccgttttccatgacggcgactctgttgcagatttttcggatgacatgcatttcatgggtaatgagcacgatcgtcagaccgagtctgtcatttatatcggataaaagatccaaaattgaatcggtcgtctgcggatcgagcgctgatgtcgcttcatcgcacagaaggactttcggattattggcgagcgcccgggcgatgccgacacgctgcttttgaccgccgctcagctgcgacggataagatttttctttcccctctaatccgaccagtttaatcaattcatcagcgcggcggacccgttcgctttttttcacgccggcgatttccagcggaaacataatgttctcccggacggtgcgcgaccacagaaggttaaaatgctggaagatcatgctgatttcctggcgcgcttttctcagcccgcggctgcttactttatttaattccgtccccgcgacttccacggttcccgacgtcggcttttcaaggccgttcaggagacggattaaggaacttttaccagctccgctatatcctataattccaaatatttcgccctttttgatatcaagagtgacatcttggacagcattgacatccccatgcttcgctttgtaaatttttgaaacattttgaagatggatcaaagcaatcacccgccttacactattctaagaaatcttccgggtttctccgcaaaagaaaagcctttctgcaaaaatgagcagaaaggcttattgaaaaaggcctttctctcatctttcaaagcagaccgcttcgagtgaattggcaccatttcaacattgttgatggttgccgggcttcatagggcacttccctccacctctcttgataagagaaaacatatcgtattttcgtccggaaattcttactgtagaatagcacggcgaatgataaaaagtcaataaaataaatattggaagatattgtcacatagtagattggcagttacggccgtttactgattgcctgaaaaaatccgtttgtcagccagaggatggcctccagcttcagcagagctctgaatgatcctttcactttgagttttccgctttggataagcttttgcaaagagacatcaccatgcaggagatggatgatttccgtctggtttccgtaaaaggtcaaattagatttttcctttgaaaccgacgtttttctcatttctccctgtccgttaattgagaccgttaaggcttctgtttctccttggaatgtaatcagcagcgttgaggcgtttaatagcggtttcaaaaacagatgctgtccgtcattctctgaaacttctattttctccactcgtataacctcccgttttaatggccatacatacactttctctttttaacggacagaaccctttataaaccgcacgacattttcctgtaaatattgtcacatcgggaacgtttgcgatgttttttgtttaatcagctcatataaataggaaacggagcggaaggcgtatcctttctcaacaagctctccgcctttaaacagcaaaaagcacggaacgctttcaatctgataggctttggcgaaagcgggggaataattcacgttgtttttatagaaggcggcgccgggcagcatttcttcgacgacagtaagcattttggacgccagctggcatgtgccgcaaaacggggtgtacaaatacaggagataaacgtcatcctgaatcgattcgagttcattttcttggagttctttcatgattaccacctcaggtcgttctttttcaaaaatacagtgtcagcatcaaagccggctctgatcagcacagatgcgagatgatggcccgggcacgactcgacttgcctgtatgttctgtctatataaatatggcgcgcttcgggaagctcccgtttcagctgttttcttaatttttctccggagtcatctgcgtccgttaaaatatagacgtctctgtcaaagaggcggtccgccaaatcttccagttcggtttggccgatcgttccgtttgtacagacgatttccgcgggttcgatgagcacttccctgactttgattttatcagattttccttctacgataatgaccttttcatctccgttgtacataagcgcgtcacctgccgattgttttagcgtcagattgaaaaagaaggcagtgaaattcaccgccaactgttaacaccagccattctcataatcgcaatcgacatatttcggatcgctgctgtttatgacatcggctgttttataaaatttttgattttcaaatgaaaagccctgtttgagctcgtactgatccatgcctgtcatctcgccgatggcttcattttcatgaaataaggaaaaccggccgttttgaaagcggcccgtaacgttctccgtcacatcgaccttttgtttatcaaaagccattttagacacctcccgttacagatagaatgtccaaatggccccttcgctatccgatcagtcttcttgtgtcatttcgtcatattgctcggaagtcatgaggttttcgatttcttcagcatcagccggttccacgacgatcatccacgctttttcatacggagactcgtttacgaattcgggactgtcatcaagttcttcgttcacttccgtcaccgttccgttaatcggtgcgtacagttcggaaacggttttgacggattccacgctgccgaatggctcgtccgctttaatttcggcgccgacttccggaagctcgacaaagacgatgtcgccaagttcggcttgcgcgaaatgtgtaatcccgatgcgggcttttccgtcctcaactttgacccattcgtgctctttggaataacgcatatctttcggtgtgctcatctaaatccctccatttttttcttataataagaagataccataattctttgaacctggcattacatccaatatttttcgaattggtcttctttaaagccgacagtgactttttcgccgtctgtcgtaatcgggcgtttcaggagcataccgtctgatgccaggagttcgagctgttcatcctctgacatatggtacagtttttcctttaagttcagctcgcggtatttcattccgctcgtgttgaaaaactttttgagctcaagaccgctcttttcatagaggtctttaatttcttctttcgacggagtttcctccgcgatatgtatttcgtttatttccttaccgcggtcttccagccattttttcgcattacggcacgttccgcatttagggtaccagtaaaaatttaacgacatcttcttcaccccttgtaaatgatcgtcgttattttaacacaatcacttgtaaaaacctataacgttgcttcatgaaaaagcgcccctgatgaaggagcgctttcagcatgtgatcagaccgtatatttttcttcacggaagacggcggctgccgcttcacgttttttctgaatgaggtttttcggcgtcaggcgcgtcagtttgcgcagcacggaaagcatcatgcggagggaatctccttcctccatggcgatcagtgattctttggcgtgcgcttctatgttctgaagggcttcctgggcaaagatttccgtatataacagcttctgcgcggctttttcggcaccgtccgccgcaattgctttttccgttctgaggacggctgattccaaagcgtacagcgcgctgacaatatcggcaatgttcaccatgatttcctgctcgccttcgatctctttgccgtatttctgcgccgcgagacccgctgtcaagagggcgatctttttcgcctgtctgacaatgtatttttcctgttcaagaggttctgagcccggctcttcaggcatcagcatcatgagttcttcttggagcgcttttgctttttcaaagagcggcagctgaccttttacggcttttttcaggaacgtgctcgtgacaatcaggcggttgatttcatttgtgccttcaaaaattctgttgattcttgagtcgcgataggcgcgctccacttcatattcctgcataaatccgtaaccgccgtgaatttgaacgccttcgtcggcaatataatcaagcgtttcagaaccgcacattttgttgagcgagcattcaatcgcgtactcggcgattgacttcgcgacttcgcgtccgtctttttgctcctcttccgtcagcctgctcatattatcttcgaataagcccactgttctgtatacagagctctccatcgcgtaaagccgagctgacatcgtcgcaagcttttcctgagtgagcgtgaagcttgagatcggcgttttaaattgccggcgctggtttgcataagcggcagacagctcaatcacccgttttgaagcgccgattgtgccgacggcaagcttgtagcgcccgatattcaggatattaaaagcgatgacatggccttttccgatttcgccgagaaggttttcttttgggacttccgcctgatctaaaatcagcgttcttgtcgatgaacccttaatccccatttttttctcttccggtcccgttgacacgcccggatagttcttttctacgataaatgcggaaaacttatctccgtccactttagcgtagacgacaaagacatctgcaaaggcggagtttgtaatccattgcttttctccgttaagaatatagtgtgtgcccgcttcattcaaaacagccgtggttttcgcgccgagggcatctgaacctgaaccgggctcagttaaggcgtatgccgcgattctttgtcctgaagccaagtccggcaaataggtttttttctgttcttccgttccgaagaacacgatcggcaatgagccgataccgacgtgagcgccgtaagacagcgaaaagctgccggcacgtgaaaacttttccgtaatgaaggctgaactgattttatccaggccgattccgccgtactcttcaggcacgtctgctccgaggaggccgagatctccggcttttttcagcagtctgaccgaatgctcgaactgatggttttcaatttcatcgatataaggaagcacatcgtttacgacatagtcttctgtcgttttaccgatcattttgtgttcgtctgtaaagtcctccggagtgaatatttgatcatatcccgtctcttcaatcagaaagctgccgccttttttgacgttgaccgtttcctgtttcatgttcgtttccccctttttttaaatgagttcaaatacgccggcagctcccatgccgcctccgatgcacatcgtcaccacgccgaattgctcgtttctccgtttcatttcatgaatgagtgacagggtcagcttcgttcccgtgcatccgagcggatgtccgagcgcgatggcgcctccgttgacgttcaccttttcttcatctatcccaagcgatctgatgacttgaatggcctgtgaagcaaaggcctcattcaattcaaaaagcccgatatcctgtaattcgagtccggcaagcttgagcgcccgcggaatggcttcaatcggaccgatccccattacctcaggcggaacgccgcctacggcaaaggaacggaatttgacaagcggcgccaatccgagcgacgaagctttttcgcgatccatcagcatgacagccgccgcgccgtcacttgtttgtgaagagttcccggccgtcacggttcccgttttagaaaaagccggacggagcttcgccaagacgtcagctgatgtgccgggacgaacgccttcatcttgagaaaagataaattgttttttccgcggcttatggtcatcaccgacttctgtcagcgatacttcaaccggcacgatctcgtcattgaatttgccttccttaagggcttttgcggcattctgatggctgcggacggcaaatgcatcctggtcttctctggatacgccgtacgtttcggcgacctgctccgctgtgtgccccatgctcatgtaatactcaggcgcatgctccgccaaagcgatattcgggcgggtcacatgccccatcatcggaacttgcgacatggattccgcaccgcccgcaatgacggtgtcacccgcgccgatcatgattttttcagcaccgtaagcgatggattggagcccggaagagcagtagcggttcaccgtaatggccggcaccgtatgaggaagccccgccagcgcaccgatattccgcgccatatttaatccttgttcggcttcaggtgttgcacatccgataattaagtcatcgatatttccttcatatccgcctgcccgtttcagcgtttcttttacacaaagcgcgcctaaatcatcaggacgaacggctgcaagcgatccttttttcgctttaccgaccggggttctcgcaccggccacaatgactgcttctctcataaacaccctcctagttccgtaaaggtttgcctttgacgagcatatgctgcattctcgcttgagatttcgcctcgccagcgaggcttaaaaaggcttctctttcaatctcgagtaaatattcttctgaaacctccgtgccgaacgggactcttccgccggcaatgacatgggccagcttcttcgcaatcttcatatcgtgatcggataaataacccgaccgtctcatttggtctgctccgagcagtaatgccgcacatccggtttccccggtgactttcacgtttttgcgggcaggcgggcggtatccgctgtcatataaggaagcagccagctgtttcgcatcgtgcagcaggtgatcctgattcatgctgatacggtctgccgcggacaaaatcttcatatcacgggcttcatgtgccgaaccggacactttggcaagcgcgattgtttcgaaggttttaatcgctgcgtccatcagttcacttccgccgtccaaataattcatgtacagctctttgtttcctccgccgcccggaataaggccgacgccggtttcaacaagacccatatacgattcgctcgccgcctgaacgcgtgccgccgggagacagacttccgtgccgccgccgagtgtcatcccaaatggcgccgcgacaacgggtttagcgctgtatttgatgttcagcatcgtctgctgaaaacggcggatgacaaaatcgacttccatgaagttatcatcctgagcttccatcaaaatcatcgcaaggtttgcccccgcgcagaaatgtctgccttggtttccgatgacaagacctttataattccgctccgtttcctcaagcgcattgtcaatcatctgaataatgtctaagccgatcgcgttgcttttcgtatgaaattccagcagcgcgacatcattgccgagatcaatcagacttgcgccgctgtttttactgatcacgccttttgtttcttttaacgtttgcaggctgatccgtttcggattttctttcacagccctgtattggccgtctgaatagtaaaatggtgttccgttttccttcatataaaatgtttcatggccctgatcaagcatttctttcacccagacggggagtgctgcgccttcttcttcgagccgctccgctgattttctgacgccgatggcatcccacatctcaaacgggccgagctcccatccgaagccccatttcatggcgtcgtcaatcgctttgatatcatcagcgatctcacctaaaagccgggctgagtataagagtgtttgcgatgtgatattccaaagcaggcgtccggcgcggtcatcagagtatataagcgctttcattttgcctttggcaccctttgcctgtttggcggcttctaaagcgggcgtctccattttcgagcgctcaccgtatgtcatggtcagcggatcgagttcatatattgttttaccttcttttttgtaaaaaccttggcctgatttgctgcccagccaattgtttttcaacatgtcattcataaattcaggaagcttaaacatgtctttttcagcgccgtcggctttatcatacacattttttgccacatgggcgaaagtatcaagccccacaacgtcaagggttctgaaggtcgcgcttttcggtctgccgatcaaaggcccggtcaccgtgtccacctcgccgatgcggcagccggaagaaagcatttctcttaccgtgaccagcaggccgtacgtaccgatgcggttggcgataaagttaggcgtgtcttttgcgatgacgacccctttcccgagcgtgttttctgcaaatgaagtcataaactccagcacgtcaggatctgtttcctgaatcggaatgatttccagaagctttaagtagcgggccggattaaagaaatgggttcctaagaaatgagctttaaaatcggcagatcggccttccgccatttttgtgacggagataccggacgtattgctcgacacgatgcttcccggtttccggtattcatcaacgattgagaaaatctgtttttttacgtcaagattttcgacgacgacttcaataatccaatcagcatccttcaattgagctgcgtcatcttccaaattccccgccgttatatagtcgagattggcagccgaagtcagcggcgccggtttttgcttcagcagcttttgcatggccgatcggctcagcctgctgcggacctccgggctttctaatgtcagcccttttttcatctcatcctttgtcagctcgtttggcacaatatcaagcagcaggacgggaattccgatgttagccaagtgcgcggcaattccggaccccataacgcctgatccgagaacggctgctttctttataaacttgtgcatgagtcatcccccttgaactttgaatgaatagtcattcattttttcggcaaaaaaaatgaaacccttttcttctttcatcttaaaagattttcaggatgacttcaatagcaaatatggaatttttttaaatttttctgcttccgcatgttccgtggcgcggacgggaaacttaaacccggaggtgaagggaatggtgcgagggagaaaagatccgtcttctgccgcagtgagcgcggccagcatgaaaggaaatgcgggaccgaagcaaaaatacggcggcggcaaacggacgagccaaaatcagcaatataaaaaagacaacatggaataacatgctgcggctgctttttggagcagccgttattttttgaagatccctttcagcacaaatgccgcatttgccgggcgctcggcaattcttctcatcaggtacccgtaccaatcggttccgtacgggacatacaccctcattctgtatccttcttcggcaagctccttctggcgctccgttctgatgccgtacagcatttggaattcaaactgctcccggggaatctgatgtttgctgatgagtgttttcgtataagaaatgatgtcatcatcatgtgtcgccaccgccgtttcatggccgctcaaaagctgcagcttaatcagctgctgaaaatgaagatcggttgcttttttatcagggaatgcaacggccgccgattctttataagcgccttttacaagcctgagccgcggcttgtatggcatcagaccgctgatgtcttcagctgcgcggtacaaataagcctgaatgacggtgccgagcatcgggaaatccggcttgcaccgcttatacagctcaagcgtacggctgcatcttgaatagtcctccatatcaatcgttacaggcacgcagcgttcttttgcctccgtcaatatgtctctgacatgctgttccgcgagcttctcggaaatatccagaccgatggatgttaatttcagcgacagctcacaatccagttgattctcggcaatcgcccggattgcttttttacattcttccgccgtccttttcgcatccttctctgaacccgcatattcacctagataatcaatcgaagccgacagccctttttggttcagccgctttaccgttttcacagcttccatgagtgtttcccctgcaacgaaccttcccgcaccgaagcggattccgtaagcctgggcgaattttgtaagcagtttatttttcgacaaaaataaacatatgctccgcagcaaggatgaactccctcctttttcttttattcgtgtatgaaatcccgatcgcagagaaagctaaaacacaaaagctatgcaaattgccaagatatcagttcatatatccatacagactctgatgtcaaagcaatgtattatattatcaagatattcaaacggttttaatgagtcacaaaaagagtcaataaaaatcactacttcttaaattgagttttcgagctataattccgcttctttgttaaattttgccccgaaaaacttttaatttatatttctttatccccttataatttgaaaatattccttaaaagataattgatttataatttacaatggcttatatttaaaattgataattcagtttattgaacgtatctattaagaaggaaaagcagaatttcaaaatgttaattctgctgaatttatctttgcctcacaaacatacctccaaagcattattatttctttctaatagctttacgatccttcatttttaaagatggcttctcttccctaacggaatttaaagaagggacctgcctgagttatccattcacctaattttgaagaatcactatgctcgaaacatatgaaaagagggaaccttcaagtggattcaacaggaaaatctaaacgtacacttttattaattggacttattatagccatgtttttttctgctctagacggaacaatcgtaggaacggttatgcctaagattgtaggagatctcggcggcctgagcatgatgacttggctgactacggcctacctattaacatctacctccatcgttccgatcgctggaaaacttgcagatctattaggccgccgggcagtatatgtggccgggctgattatattcatgattggctcttcactgtgcggcttggctgataatatgaaagaattaattgtgtttcgaggtttacaaggtcttggcggaggcattatgatgccgatggctatgattgtcattggagatttattcacaggcaaacagcgtgccagatttcaaggcgtatttggcggtatttacgctcttgcttctgtaatcggaccgcaaattgggggatggattgtagattctttcagctggcattgggtattttttatcaatttacccgtgggaatggtagctgtgttctttattgcgatgggattgcaggccagaaaatacacgggtccgattcattttgatttcatcgggatgtttacaatgattacgggtgtagtctgtttgctgcttacactcagtttcggcggaaaagaatttgactggttatcatggcagacattttgtctgttagctttggccactataagtattattagttttgtatttgcagaaaaaaaagctgaagaaccaattctgcctatacatcttctaaaaagcagaacttttatcttcctaaatttaatagggttctttatgagtattgggatgtttgcagcaatcaccttcgtccctttcttcatgcaaggaataatcggcatgagtgcatcagagtccgggacaatcatgatgccgatgatggtcgcaatgattatgtccagtattataggcgggcagctggtctttaaaatcggcattaaagctcagattatcacggggatggcaatcatatcctttgcctattttttattatccacattagaagctgacaccagcaaattaactgcaactacttatgtagctatcatcggcttcggtatgggccttgttatgcccattattactctggcacttcaagagagtttctctaaagaaacgctcggcgtggttacttcgtcaagccaatttttccgctctatcggaggtacgtttggaattacgattctgggagcagtgatgaatgccaagtcaggaaatatattaaccgataaattagttccttttttagacaatttcccaaaacaagaaaacgcattggcaactcatctcaaagacttgatcagcagcaatcctcaagtcctgctacagaggctattcagttctgattcattcgaacaatttccgcattctatagcaaagcacatcataccgatactgaagacagcgttaatggactctcttcgcagtgtatttttcgcagggcttatactattaattgccggagtattttctgcttttcttttaccaaaaataaaaataaccgaaagaaaagccggcactgatctagacaataaaccggcagctgaagtccaatcctagtgccgctgctgactttcgcatatattgaactgttaacatgaacaggcattatccgaaggtttattcttctgatagtgtctttttttattgtaaatattgatgtctctgctgcaaatcgtggttattttaatttacctgtatgaaatcccgatcgcagagaaagctaaaaagaacagaattgaaggaggcgtttatatgaacaatcaagagcagcacggaaacttgccgcctgccgtcatctcaacgaaagaccatttgtatcttgaggacatgctgaactggaatctgcttgccatgaaaaaagcgcattttatggcggaacactgccagaatcagacgttaaaacaagagcttgatcagatcggccggatgcatcagaagcattatcagcacatattgggccgcttgaaccccgatcaaggcggacagacaacaacaggctatatgcaataggaggacaatacatggaacagcaaaaccaaaaaatcacgaatccgcaaacgcccatgcccaatacggcgcaaatgaatgacagagacttggtgaatgagctgctgacgacggaaaaatacatcacggcttcatattgcacagctctgcacgagttcagccacgagtctctttaccaagatattcaggcgattttcgatgagtcacaaaaagcgcaaagaagattatacgatgtgatgtttcaaaatggctggtattccattgaagcagccgatactcaaaagcttcagcaatcgtatcagaagttccggcagaccattcagcagcagtctccctaccagcagtaaaacgaagaaggatttgatgttttcgacaagcatcaatcctttttttatttttgcacaaaaagattgacttgtcattaatccttatttatatttaactaatgttaattattttctcaaggaacaagatgaggaggagttatgaaaaacgcggatcaatatgtgtctgacatccagaaatctcttcagacgctgctgcaaaacatacagcctgaaatggtggaaagcatggcaaaacacgaggtgacgcctgcccaattatttgttttagccagcctgaaaaaacacgggagctgcaaagtttccgaaattgcggaacgcatggaggtaaagccgagcgcagtgacgctgatggccgaccgcctcgaacaaaaaggactcatcgtccgcaaacataaccagcaggacagacgcgtcatcgacatcagcctcaccaaaaaaggagaaacaaaattcgaagatgttgtggaaggacggaaagcgatactggcgcgaaacctatccgttctgactgacgatgaactgattcagtccgtgaacatcatccgcaaagtagcggaagccgccgagaaatacgcggctgagcaaaaagaaaacgaatagaaaagaggagctgccgaaacatgagcattgaaaagaaagatccaaaacgcacattattaataaccggcttaatcatcgccatgtttttctcagcccttgacggcaccatcgtaggaacggcgattcctaaaatcgtgggtgacctcgggggattaagcatgatgacgtggctgaccacggcatatcttttaacttcgacgacgatcgttccgattgcggggaaacttgcagatttattggggcgccgcgtcgtctatgtatcaggtttattgatttttatgggagcttccgcactgtgcggaatggccagcaacatgacggaactgattattttccgcggacttcagggaatcggcggcggtgtcatgatgccgatggctatgatcgtcatcggggatttgttcacagggaaacagcgtgccaagttccaagggcttttcggggcgatttacgggcttgcttccgtgatcggcccgcaaatcgggggctggattgttgactcattaaattggaaatgggttttctatatcaacctgcctgtcggaattttagccgtgatctttatcgcaagaggacttcaaggcagaaaacagaccgggccgattaactttgacatcgccggcattttcacaatgatcgtcggaatcgtcagcctcctcctcgcgctcagcttcggaggaaaggattacgcatggggctcttggcagattctcggtctctttgcgcttgcacttgccgggattgtcggattcattttcgctgaaatcaaagcaaaagaaccgattctgccgatgtacctgtttaaaaacagaacgtttaccgtactgaatctgatcggctttttcatgagtatcggcatgttcggcgccgttacgttcgttcctttctttatgcagggaattatcggagtcagcgccaccgcgtccggcacgattatgacgccgatgatggtatctatgattatcacaagtattatcggaggccagctggtttataagatcggtattaaaccgcaaatcatgatcggcatgctgatcatggccgtcggcttcttcttattaacgactttgcagctggatacaagcaagctcgcggctacatgctatatggccgtgatcggtctgggaatggggctcgtcatgccgcttctcacactcgctctgcaagaaacgttttcaaaagaagagctgggtgttgtgacctcttcaagccaatttttccggatgatcgggggaacgttcggcattacggtgctcggcgctgtcatgaatgccagatcaggaagccttttaaccgacagactggtgccttacttagactcactcccaaaacaggcaagtgcctttgccgcccagtttaaaggtatgattgacaagaatcctgaagggctgcttcaatccctattcagccaggaatcgattaagcagattccggccgcattttcttcccatatcgtgccggttttgaaaacgtcactgatggattcgcttcacagcgtgtttttcacaggcctggcctttatcgctgccggattgatcctcacgctgtttgttaaatcaattaaactgacaaacaaaaagacaggcaaacaagaagaaaaggcgaaagccgtttaacaaagaaaaatcccgcggatgccgcgggatttttttatatcatctgggcctccccgtttccgaatgaccagtcttccgccgcattgcctgagaggacgataaacacatcttcttttctgacgcccagcttttcgtgcagccggtcagccaaatgctgatagaatgcttgtttctgatgagttgttctggagtttttcaaagtaaagcggataaacatcagttcatcgctccgctctacttgaagatatgacggatcatagaaaaactcccctttttcgtgctgatgcaccacttgaaaatagtcatcatgcggaacatcaatcatctccgtcatggcggtgtgaataacagtgctcatttttttgagccaaagtccgctttttcctttctgtaaatggatctgtacaaacggcacatttctctctcctttcgtcacatcgtctggccgcaatcggctgttatgatttgtcccgtcagtgattcctgctccagcacagagcaaatcagttctccgatatcttccggagcggcgatccgttccagcggaaggcttccggcaagccggtacatcgtctcttcccgccccgtccaccatcttgttgcaacggctccgggcgcgacacagcatacacggatgtccggcgccagcgcatgggccaatgattttgtcaggccatgcacggccgctttggaaacggcatacggaagggaagaacccgctcccgtcaggccggcgatgctcccgacattcacaatagcacctgacttttgctttttcatatgaggcgctgccgctctggcgcaatgaaacatcccgtttacattgacagcaaataattcatcccatacttctttcgttgcagattccaaatcatgaagcggaatatgtctggtgatgctcgcattatttacgagtaaatcaaggcttccgaatcggctggccgcttcgttcaccatgtctctcgcctgtttgtctatagaaacgtccgcttgaatggtcatcgcgtgtccgcctgcttttattatgaattctgccgtttgttccgcttccgtttttgaatgtgaatagttaatgacaacagccgctccccgttttgctaaggccaggcacgccgctcttccgattcctgtaccgccgcctgtgaccagtgccgttttatgttgtaaattcatggcttcttctcctcttacgttcgatgttcatcagctgatatgtttattgtaatggagatgtgcattttcgtataatgattgttaaagatgtttcatatcacaaaaaatgatagcaaagagggagagatgacaatggaaagcggagatttgcggatttttcagatggtggcccgtgaaggttccattacaaaggcggctgcgcgtctcggctatgtgcagtcaaacgtgacggccagaatccgccagctggaagaagatttgaaaaccgagctgtttttccgccataaccgcgggatgacgctgtcttcaagcggcacggtgctcctccattatgcggatcaggtcgtcggtctgatagaagaagccaaaatggcgctcgcttcaacagacaagccgagcggaccgcttatgatcggctccacccagacaacagccgccgtcaggctgccaaaacttttagcctcttattatgagcggtatcctgatgtggagctgtcccttacgacaggacatacacaatatgtaaccgataaagttcttcgctatgaattggacggcgcatttatcggctgtcactttcatcatccggatttgcactccatcccggcctttgaagaagaagccgttgtcgtgactcccgctgccgtcaccgctatagaagaagcggtaaaaaagccgcttcttgtgtacagcacgggctgcacgtatcgtgacacattagagcggtggcttcattccattggaacggcgcatccggccattatggaattcggcacccttgaagcgattatcgggggagtgacagcggggctcggcattacgctgctcccgcgaagcgtaattactcagcacgccgcactaggcgcggttcggatatggaccattcccgaatctttcagcatgatgaaaacggaattcgtcacgcggaaggattcatatatgagctgtgcattacgggcctttattgattccttttcagcaaaaaaagcttccggcacctctctttgatgccggaagctttttattgtatttttctgtgctcttcattgagctgtttaatgtgctgtaccgcggctttgatgccctctttggcgtccaggctggattggttccaatgttttaccgttcagcaaatatctaattatgatcgaaaagaacaattgaaaaaaaccacgagatccgtatagcaaaacggctctaatagcaggcttaccaactaaaaacattaatttttaacagcgtgtcaaaggaagccggcattaaactaacaatcgcaagtacccaccccgcaacaagtgaaacgggaaatgaatgtaagcaacaagtttccccctcattacatcccttaaaagaaaacatcaaaagctggagaagggtgtcctttttcttatgccgctaacggtgcagttgagtaaggagtatgatgaaaccctttaataaaccttaaacatttcatagttatctttatagtacgacataataaagtcacgaaaatttcttaccgaagaagacaacagcttatgtctcatccaagataagccgactggatatgaagcagagtgatcagtcacttttataaaattcagccccaatgttctgcaaactgaaataggcagcaacgccaccccttgatccagctttataatctcgaccagtaaatgagaatctgcctcaaacgcaatatttggggtgaaaccggctttctcacaaagcgaggctgtaaaaccgctatactcttcattattagcaagggtaataaatggttcatcggcgacaaggcgtaaagaaatttctgttttacccgtaaatcggtggtttgagggcaaagccagaacaatatcttcatttaccagcacccaactctctatctcttcatcttgaatcggatgacctgttattcctaaatcaatgtcccctttttttaaacttgttatgatctcgcttttaactccgattgcttggagaatttttgattgaggggagcggttgatatattcactcatcagtcctgcaaggaatcttggattggaaatagatattctgatggtgtcagaaatttgatgttcctccaattgaatttccgtttgtgcattttcaatctcagtaaaaatcctgtttacatgttttaaaagaattttccctgctgaactcagcttaatatttctgccttttctctcaaacaaggttgttcccagttcattctcaagtctttttatagtgagacttaaagaaggctgggcaatctttaattgttctgccgctttagaaatatgttcagtataggcaactgtctgaaagtattttagctgcagcaattccatctgtctgcacccccttatttatttcaataaatatatatataccttattatgtattggattaaatgtaaatgcgaatgtaagataatagcatagttatagaaaaggaaagggtgtcattcaatgaaaattgatgtgaaagatatagcaaaaaatttaaatacgccactaacagcccctgcttatcctatcccaaattataaatttgttaaccgtgaatatttaaatattatttaccgaacggatgaaaaagctttacgtgcagcagtgccggaacctcttgaaattactgaacctttagtgaaattcgaagtgatgcggatgcccgatgtttccggacttggcgcctatacagaggctggacaagtcatccctgtcagctttaatggtgaagaaggagattatgtacattctatgtatgttgacaatttcccggctattgcaagcggacgggaacttactgcatatccaaagaaattgggtgcccctaagctgtatatagactctgatactcttgttggcacattggattatggcagtcttcgtgtggcaactgcgactatgggatataaacatttcgaaatggataaggaaaaagcgaaaagggaaatttgccgacctaattttatggttaagattgccactgattacaatggtgatttaagggtttgtgatttggtgcggacgcaaataacgaatatagaagttaaaggtgcctggactgggccggcgcggcttcaattatttgaacatgctctggcacctcttgcagatttccctgtattagaagtcgtttcagcatctcatatccttacagatttaaccttaaatgcagcacagccggtttataactacttagaggaaaaataaggagacgtttacaatgagaattgcagttttaggagcaggttctttaggaaccatagttggggcatatctgtctgctggcggaatggatgtcgaattgattgattcatacaaagaacatgtagatactctaaatcaaataggtgctaaagtagttggtacaacggaatttcaagcaaaggtgaaagccatcacccctgaaaacaaatcaggcaagtatgatttcatattactcctgacgaaacaattatataatgactccatccttaaagagttactgccttttttaaaggatgacagtgtagtatgttccttgcaaaacggtatacctgaacagaaagttgcttcgatcgttggtgatgaacgtgttattgcaggttctgttgaatttggtgctacgtttattgaaccaggcgtatccagacttacaactgagtatactcaatttaaagagtacgcttttcaaattggagaattacatggtgaaacaacagaaagaatccagcgtattaaatcggttttagaccttatcggcggaacacatatttccgataatttagttggaacgaagtggtcaaaattacttatcaataatgcattcagtggtttatcggctgcattaaacggagaatacggagacattcttgaccatgaaatcggcattgtcagcgcagtccatatcgcagatgagacgattaaggtgggacacgccaatggtgtcaaatttgcgaaaatgggcggccttgatttagaatctttggaattaagaagcgaaaatgatattcctgaacgtatccaaacatttaggtcagccatggaaccatctaggctgctaagagcaagtatgcttcaggatcttgagaaaaaacgcaaaacagaaattgattatattaatggagttattcccaaaatggcagaaggtactggaattccaacaccttttcatgatttggttgtagcacaagtcaaatgtgccgaggaatctcaaacagtgcccaattttgatacaaatataaaagcatttgaagagttattacgtatccgaaaggaaatgtgatatataggaaagagagaaagggattgctgcggcggtccttttttcttggttcagcaagcggaagaaatatacgttaacaaacgggtgcgttagttacattaaagttcttcgctatgaattgaacggcgcctttccttttcagaaaaaaagcttccggcacctctctttgatgccgaaagcttttttattgtttttttctgtgtgcttcattgagctgtttaatgtgctgtatcgcagctttgatgccctctttggcgtccgggtaggattgattccaatgtttgacgagcggaggcatgctttttgcgatatgtgtatacaaaatccactgcctgacttcttcctttacatccgggtttgtttcgccaagcaatagttccgtgtatttctcaagcaggccgtccagctgctgctgaagtttctcttccataccgttcccttccctttttcatgattatgacaatcgggcggtgagggccgcttcctgcacgatacatctgccgcgtccgtgcggaatgcaaagcggcgtgccgaacagcgggtcttgcgttacctggcagttcatcgcaaagacctgctgtacaagctcgcaagtgatgacttcttcgggacggccctctgcgtaaatctgtttatccttaatggcgaccagataatgggcataacggcatgccagattgaggtcgtgcagcaccatgacgattgtgcgtttttctttttcatttaattcaaacagcaaatcaagaatttcaatttgatgcgtcatgtcgagataggttgtcggctcgtcaagcagaatgatatccgtatcctgagcgagtgtcatcgcaatccatgcgcgctggcgctgtccgcctgacaaggaatccaccggacggtcggccatttcctcaagcttcgtcgctttaagcgcgtttgccactgcgtcttcgtcctctttggaccattgcttcagccagctttgataagggtatcttccctgcttcacaagctgatgcaccgtcaggccttcgggagctgacggactctgcggcaaaatagcgagctctcttgccacttccttcgtcggaagcttagcgatggcttttccttctaaaagcacagaaccgcccctcggtttcatcagccgggccaatgaacgtaaaagcgtcgattttccgcagccgttgcttccgatcaatacagttatttcgccttttggaatcgcgacatccaattcgtcaatgataacagtttctccgtaccctaagctcagcgtctctgtagaaattgcactcataccgctaaccgctccttttttgagtttcccaacactatgtatataaacaaattgcctaaacattcaacgtgagatcatgattatattgtaacagaaattaatgactctgaatatcattatcaattagttttgggcaaaaaagcagcggacggcggttatttttttatttctgtcatttctccgtcgttctttttcagtttcagataaaaatggtcatagcggctgtctaaattaaaagccgagagcacctgccggacgacctcgctttcctgcatccggctgtttacggcaagttctccgaggatcatcttcatttcatcaagcgcttcctcgccctctctgtgaacccctgagagcttgtcccggatgtccgccttttcatgaccgctttttctttcatacaaaccttcatagcggttatgctctccggctccgtagctgacgcgaagggaaaagctgctgtaaggaaccggcttcgcggatgacacgggtgtgctgtcttgttccgcttcccgtttttcttcattcaatcggcagccggcaatcagcatcagcgtaagacataaaacgcccgccgtcctgaaccatttcatgcgattcactcccattccattccgatcgtttttaggtatttccaagggaggcggctgtcattcattaaacaaaaaagaaccggagcggtaacactccggccggttcatctccagattatcattcagtcagctctaaaaattcctgcacatcctgtacagcaaggcggactgcgtcttcccaaaacgaccgttccgtcagatccgctccaaggtgcttcatcgccaaatcctcaacagtcatcgaagccgtgtcacacaaaagcgcgatatatttttcttcaaaatccgctttttcccgaagagctcttgcatatattccaagcgaaaataagtaaccgaacgtatacggaaagttgtaaaacggcactcccgtaatatgaaaatgcagttttgacgcccagaaatgagggtggtattcccctaatgaatcgcaaaacgcttctttctgcgccgcttccatcagttcattcagtttctcagccggaacgacgccctgcttgcgctcttcataaaaacgcgtttcaaataaaaatctcgcatgaatattcataaacatggctacgcttctttgaattttatcctcaagcaagaacagcttttcatcctttgtttccgcttgtttcaaagcggcgtcggcgacgatcatttccgcaaaggtcgaggctgtttcagcgacattcatagcgtaggctctgttcagctgccgcacttgaagcatggcctcctgatggaacgcgtgaccgagctcatgcgccagcgtcgatacattcgaagcgcttccggaaaacgtcataaaaatccgggattccccgctgtcgggaaagctggtgcagaaaccgccgacccgtttgccgctgcggtcttccgcttctatccaccgatcgcggaacgctttttccgtaaacgcggacagctttttgccaaacgtcgaaaattggctgacgatcagattggccgcttcatcaaatgtgtattctttcggagcctcgccgatcggcgcgtccacatcataccagttcagccgctcaagccctaaaagagatgcctttcgattcaggtattcggcaaaaggttttttatgatcggtaatgacctgccacatgacatccagcgtttcttttttcatccggttgatcgcaagcggctcttccaaagcgcttttccagccccgcgctttatagatttccgtgcggaagccggccagatggttcagcgtgctgccgaaaagctcctcttctcctttccaggcttcattaagctctttgaacacttggcgtctgatgcggcggtccgggtgcgccatcatattttccgcttggccgaccgacagctctttatcctcaaacggaatcttcattctgccgacagccgcattatacaggtcgccccatgcgtgatagccgtcaacggccaggccttcaatcagcctttcttccgaagcgctgagcttctctttgacacggtctcttctctcatttaaaacatatgtgagatcctgaagttccggtttttgcagcagctcctcccagacccgctcgtcaatccgggcaagtgtatcgtcaagggtgaccagagcggatttaaaatcactgctcagctgattaatccgcgccctccattcattcgctttctgatcatgagtgttctgagcctgaagacagccgacgaacgctcccgcctgcctgatcatgatcgctgaccgttcaaacctatcaatcagattgatcagctcccggctttcatccgcatgcgtcggaaccgtaaacgcttcaaccgcatgttgaaaagcgcttagatgatttttgagctcttgtatgtattgctgaaactcttccgaccggctcccgccctcaaaaatggagtttaaatcccatgtttccttcaatccctctaatgccatcttttctttacccctttctatccgaagctgactccattataaaacaattctgacatatttccgaacgatttctccttctttccgcgagatgttatacactatgagataagaacaaacggggaggattataagatgaacagaaaatttgccattgtaaccggcgcgacgagcggattcgggctgctgacagcgctgaagctcgcccggtcttatcacgtcatcgcaacagccagacagccggagaaagctgaaatactgaaagaggccgccgctcaagcgggtgcatccgaacatgttacggtcgtttctttagatgtgacaaatgaacagtcggtgtctgacttcgggaacaccatcagcggtttcggaccgattgacctgctcgtcaataacgccggcactgcgtacggggggtttattgacgatgtgctgatggaacattacagacagcagtatgaaacaaatgtattcggtctgattcacgtcacaaaaaccgtgctgccttatatgcgaaaacatggcgggaaaatcttcaatatcagcagtatcagcggactgaccggtttcccggctctatctccgtatgtctcttccaaattcgcggttgaagggtttacagagagcctgcgcctcgaactgctgcctttaggaattgatgccgctttaatagaaccgggctcctacaaaacatctatatgggaaacgtctctctccaatcatcttacggcacccggcaaagattcgccttattaccgctattatcagcaaatcgaagcttacttcaaagccaacgcatccaaaagcggcgatcctgatgacgtagcggagctgatttatcaattggcacaaaggaaacggctgaagaaactgcggtatccgatcggcaggggcgttaagctgacattggctttccgctcactctttccgtggtccgcctgggaatcgattataaagaaaaagctgttcacttaaacccaaattataattattataatttagtattgatttctatttaatacgtgatataattaaattatcagatcacagggaggacgatgaatatgaatacacaaaacgcgaaaaaaactgaaactcttgttgagaaatcaatgaacacacaattatcaaactggtttatcctttactctaaactgcaccgcttccattggtatgtaaaaggccctcatttctttacgcttcatgaaaaatttgaagagctgtataacgaagcggcggaaacggcggatgctatcgcagagcgtcttctggccatcggaggacagcctgcggcgactttacacacttaccttgaacaagcttccattacggatgaaggtcaggaaaaaacggcttctgaaatggtggaatcactggttcaagactataaacaaatcagccgcgaatcaaaatttgtcatcggcatcgccgaggaacaaaatgacccgtcaactgccgacctgtttgtcggattagttgaagaagcggacaagcatgtgtggatgctgtcagcctacttgggagaataacgaaaaaagctgaacctcagttgcaggttcagctttttttatgcgttcagcttgcgctttcggtttgtttcgttaatgtgacgttcagcgtctttttgcttccgcttctgagaacttgaacagtcgttttatcgccgattttcagctgattatataagatctgtctgatatcggcgctgctgccgacatctttgccgttcaattgtacaatgacgtcatttgatttgatgcccgctttcgcagccggcgagccggactgcacttcttttacgtaaacacccttagacagctggtcgccgaacagtccgagcgtgttttcctgataagtttccggcacttgcgccatgtcaatcatctgcacacctaaaaatgggcgctcgacttttccttttgcaagcagctggtcgactatcggttctacatcattgctcggaatggcaaagccgagtgattccacgccgttttcactgactttcatgctgttgatcccgataacttggccgcttgagttgattaacgggccgccgctgtttccggggttaatcgccgcatccgtctgaatcacgttcatttccactgtgccttgggatgtatcggcgtctaccgttctgttcagcccgctgatgacaccttgtgtgacggtgccggaaaactgctggccgagcgggttgccgatggcaatcactttatcggcaatgcggagcttggaggaatccccgaagctggccgcttttttgacattggacgagctgatttccaatacagccaagtcactgatggcatcctttccgacaagctttgccgtttcggttttcccattgtaaagagtgaccgacagtttgttcgcaccttctacgacatggttgtttgtaatgatgtacgctttttcgccgtcttttttgaagatgacgcctgaccccgtgccgctctccgtttcagagcttgaaccgccgtcaagtccgaactggctgctttgcgaagcttggtagttggacactccgacaatcgcaggctccaaagcttctaccatatccgctacgcttgaggtatttttcaaaggcgttgacgtaaaattcgaagactgaacttgtttcgtatcagaaacggcttctgtcttatgctgctcactcggcaggtttggcacaatgccaagcacgaggccgccgccgataatgccgcctaaaatcgggctcagccaagcggctctccgttttttttcttttttcacggcagccgttttttcaaattccgtaccggccgccgtctcgttttccgcttctttcgagacgggcccttcgagcagctcgggctcctgctgttcatttctgttttgttccgtatgtgaaagatctgactgatcgcggcttctgccgtcatctcgatgatcattcatattcacgcacactccttcagcatgttttcattctatcgattacatattcatcgcatgtacaagttctattgtcccaataataaggagaaaagcaaagctccaaaacaaaatgtgtttgaacatgttatcttccccgctttttttcttcctttcttcccttatacacatcataaacaaacattgtgggataaaaatgaaaagaatatgtgaaattatgaaaatgcggcttgagtatgttaaaactagtataatgacgttgaaaggatgtgaaatgccttgtcatacaccatttatctagttgaagatgaggataacctgaatgaactgctcacaaaatatttagagaatgaaggctggaacattacatctttcacaaaaggcgaagatgccagaaagcagatgcagccgtctccccacttgtggattcttgacatcatgcttccggatacggacggctatacattgataaaagaaataaaagaaaaagatcccgatgtgccggttattttcatttccgcgcgggatgccgatattgacagagtcctcgggttggagctcggaagcaatgattatatcgccaagccctttttgccgagagaacttattatacgggtccagaagctgctcgagctcgtgtataaagaacagcccgccgcaaagaaaaccggcatcaccgtttcttcctacaatgtgatcgaagatgcccgagaggtttatgatgaaaccggcagcctggtcaatttgacgtctaaggaatttgatctgctgcttttatttcttcaccataaaggacaccccttttccagggaagatatcctgctgaaaatatggggccatgattatttcggcactgaccgggtggtcgatgatcttgtgcggaggctgagaaaaaaaatgcccgggttaaaggttgagaccatttacggattcggctacaggatgatgacgtcatgaaaaataagccgcttgcttttcaaatatgggtggtcatctcaggcatcctcttagccatttcgattctgcttctcgtgctgttctcaaatacgctgcgtaattttttcacggatgaaacgtatacgaccattgaaaatgaacagcatgtactgacggagtaccggctgcccggatcgatcgagcggggatattacagcgaggatgcgaccgcgccgacgactttccgatccgttcagcacgttcttctgccgcaacgggaggaatcggccagtgacaaagacttgaactacttttcttcttcctttatccataaggtgtacaagctcgcgggccgccagcacagcgtcacgaaacgatacagcgcggatatcagcggtgaaaaagtatttttcgtcattaaaaaagggcttaccattaacggccaggatgcgatgatgctgtcttacgcccttgattcttatcgtgatgatctggcattcaccctgttcaagcagctgctctttatcattgccggcgtgattttgttaagctggattccggcgatttggcttgccaaatatctctcgcgcccgctcgtttccttagagaagcatgtcaaacggatttcaaaacaggattgggatgatccggtcatcgtcgacagaaaagacgaaatcggaaaattaggccataccattgaagacatgcggagcaagctggtgcaaaaggatgaaacggaaagaacgctcctgcaaaatatctctcatgatttaaaaacgcctgtcatggtgataaggggctatactcaatcaataaaggacgggatttttcctaagggggatctggaaaccacaattgatgtcattgaaggcgaagcagaaaaacttgagaagaaaattaaggatttattatatttaacgaagcttgattatttaatgaagcagcgggtgcaccatgagacatttgacattgtgaaggtcacggaagaagtcattgaacggctcaaatgggcccggaaggaattatcgtggaccgttgaaacagaagatgcattaataatgcccggtgatccggaacaatggagcaaacttcttgaaaacattctcgaaaatcaaatccgctatgcagaaacggcgattcacattcggatcagccaaaatcagcagcagattgtcatgacggttgaaaatgacgggcctccgattgaggatgagatgctatccagcttgtacgagccttttaataaagggaagaaaggcgagttcggcataggactcagcatcgtaaaacggattttaaccctgcataaagcatcaatttcaattgaaaatgaccaatcgggtgtaatctaccgaattatcataccaaagtagactgtagtgtttcattgcagtcttttttatgtgaaggaatagccgttaaaatctctgtagtttgctttcagcggtttttggcattgatgaacccatttcttttcacaaattgtctttttcggatatttcaccttttcgactttaattcctctgtttcgcaagcggctgatcatttcatctaattctttcattttcagattcaccctttcgccagaactttgaccattcggtcagctcactttataatataaataaaacaaaacaaaaaaacaagttacaatcaggttaaatttacggaatatcaatatgaccatatagtcatacatgagaagcacaagccagcctcctggctccgaaagggtggaaccattgaaggaaaaagaaaagctgatcattgaagcagcaattaaactgtttgcccgaaaagggtacaaatctacatcggttcaggaaatcgccgatgaatgcaaaatctcaaaaggcgctttttatctttactttccttccaaagaagcactgcttctatccatgctgaattactactatgataaaacgtttacccgaatcacgacgatccaaacggagggtgacagtccgagagccgcttaccaaaaacagcttgcggtgttttacgaatcgattctcgcccatcaggattttattaccgtgcagatgaaagacggttcacttccttataccgaagaagcggcgcagtgcggaaagagaatccgccggtcgatcctgcagtttcatatcgacagtcttcttgcgatttacggagaaaaagctgaaccatacacagccgagctttgttttttaatagaaggaatcagtcagatgtatcttgaatatctcattctgaccggccggtccgtacagccttcgcttttggcaaataccgtgattcacagaattgatgacatcgtaaacggaatggcggacagacatgatgaagcgtttatttctcttgatgaggcaagctcactgttcgggccccttcataacgggcagcccgatcctttaagccaatcgatcttgcagaccctccgtacgcgcatcggcacgatggacaagacgcaagcatctgaattcaccgagagcttggatattctggaagcggaaatgaagaaaaagtcgccgaaaccggcaatcatcaaaggaatgattttgaatttgaaggaatccgacctgctggctgaagatgcagaacagctcagatttttactgaaacagcagtttatttagaagaacggccgcaatgactgcagccgttctttctttttatgctttcgggtgcaccatatcttccggacgcaccatttcattaaattgttcttctgtcagaaggttcagctgtaatgccgcttctttcagcgtcaggccttctttgtgggcaagcttggcgattttcgcggcgttttcataaccgatgtgcgggttaagcgccgtaacaagcattaatgagttagagagattttcctgaatcgtctcttggttcggctcaataccgacagcgcatttgtcatggaaggaattcattccgtcactgagcagctgcacggtctgcaggaagttatagataataaccggtttgaagacattcagctcgaagtttccttggctggccgcaaatccgattgtcgcgtcatttcccatcacttgcgcggcgatcattgtcagcgcctcactttgcgtcgggttgactttgcccggcatgatagagcttcccggctcattttcaggaatgacgatttcgccgattccgcagcgcgggccgcttgccagccatctgacatcgttggcaatcttcatcaggtcggcagccaatgcttttaacgcgccgtgaacgtgagtgatttcatcatggcttgtgagcgcgtggaatttgttaggcgaactcttgaatgtctgccccgttacttttgtgatttcttccgcgacgaattcaccgaactgcggatgggcgttgattcccgtgccgactgccgtgcctccgatggcaagcgcgcggattttttccgttgactcaaggatcatttctttcgaacggtcaagcatgtatacccagccgctgatttcctgtccgagcgtcagcggagtggcgtcctgcaaatgcgtgcgtccgattttcacaatatcctgataagctttcgctttttcatcaagcgtcgcgcgcagctgatcaagcgccggaacgagctgctcatatacggcaagaaccgccgcaacgtgcatcgccgtcgggaatgtatcgtttgagctttggctgcggttgacgtcatcattcggatgaatcttcagctcggaatttttttctttcaataaagcagtcgcgcggttggccaccacttcattcatgttcatgttgctttgcgtgccgcttcccgtctgccagacaacgagcggaaagttatcgtcgtatttgccgtttaaaacatcgtcacatacagcggcaatcgcctgtgctttttcagactctaagttgccgaggcgttcgttggcgatcgctgtgcttcttttcaatattgcaaacgccttcacaacacgctgaggcattttttctgaaccgattttgaagttctctttgctgcgctgtgtctgagcgccccaaaatttatctgccggaactttaacttctcccatggtgtctttttcaattctgtaatccatttatgtatccctccataacagttgcttcaccctgagtattattcgccagtaacagatgaaaccctttttatttttcggccttggccgtttttaatttcagctcaagatagacgcgcgaatccttagagtatttatacttcggatttgttttacggtattctttcgacgtgtaagccacttcgtaatgcgcttcaaatgatttgatgagctgttcaatttcttcggcatttcctgccagtctgacttgtgccacatctctcctccgctttcataaaaaaacttgtaccattaaatactttatcatagtatatcatttttttaacaggaaaagataacctcaattaaggattggaaggcgggtgactgtcgatggcgcaatcggaattcaaggaatacatacacgttaatctggcactggtgcttccccacgtagagcagaatgatgacctggttcaaaataaaaagatgcttccgaacgggcttgttttttattatatgtatctgagtgaaatgaacgacgaagacaaaataaaagaggcgattgaaacgctgcttcgggaggaagacactctgacgctggatacggtgacgaaacgtcttgataagatcgacgcccgtcccgtctttacgtcgaaggaagccgtcatctccattctgcggggaaaatgcgccgtgtttattaacggacttgacagcgtatacattttgtccacgggaaaaagagaaaaaagaagcgtgaatgaacccacatccgaaaaggtcgtaagaggtccgaaaatcgccttcatagaagattctgatacaaacgtcgccatgatcaggcagcggacgaaccatccgaagctgaaaacgaaaaaggttccgatcggagaaaataagttaaaatacgccacggtcatgtacatagatgataaggcggacccgtcagtcgtcagcgatgttgtaaagcgcctcagcgatgtgaagatggacgacatccaggattccgggacgcttgaggagcttattgaggataataagtattcgccctttccgcaaatacaaaatacggaacggcctgataaagtctcttccgccttgttcaacggccgcgtcgccatccttgtcgacaactcgccgtttgcgctggtggttccggcttctttaggaattttaatgcagtctcccgatgattattatgaacggtggatttccgcctcgctcatccgggtgctgcggtttacgtctatttttattacgctgtttttttcgtccatttatatcgccctcgtttcgtttcaccaagggctgctgccgacgtcgcttgcagtcaccatcgcggcgaacagagaaaacgttcccttcccgcctattattgaagcgatggtaatggaaattacgatagagctgctgagagaagcgggcttgaggcttcccagcccgctcggccagacgatcggattggtgggcggagtcgtcatcggccaggcggccgttgaagcgaatattgtcagctccatcatggtcatcgtggtcagcattgtcgcgctcgcttcatttacggtgccgcagtacgggatgggtctgtcgttccgtgtgctccgtttcatttcgatgtttaccgcggcagctttcgggctgtacggcatgattttatttatgctggcgatctacactcatttatcgagacagcgaagcttcggttctccgtatttctcgccgaatggatttttcagcttaaaaaacgcaaacgactctattctccgtctccctattaaaaatcaaccaaaagaggcgaaaaacgtaaatgagccagaaaacaactcacaataagcttacaagctatcaagggacagcattgatttcaaacacgatgctcggcgcgggactcctcaccatgccgcgggcgctgtcatccagggcaaattcgccggacggctggatcgcgttatgtctggaaggcgtcatctttatctttttgatttatctcaatacgctcattatgaaaaagcatcagtacgggtcattatttgattatatgaatgaaggactcggcaaatgggcgggaaatatcgtcaatcttatgatctgtctctattttataggagtcgccagctttgaagcccgggcgatggcggaaatggtcaagttctttttattggaaagaacgcccgtgccggttacgctgtttatctttatcgcctgttccgtttatttaattatcggcggcatgagcgatctcggcaggctctttcctttctatttaacgattacgatcattattttgctggtggtgttttctttcagctttaaaatatttgatctggacaacctgcggccggtgctcggacaggggttttctcccgttatcgcctccttgaccgtcgtttcagtttccttcttgggaattgagattatgctgtttctccccgagtacctcaaaaataaaaagcacacattccgcatgtcggccatgggctttggcatcccgattattttatacatcattacgtacgttctcgtcgtcggcgccttaaccacacaggatgtcaaaacaatgatctggccaacgatcgcgctctttcaatcatttgaaatcaaagggctttttattgaaaggttcgagtcctttttgcttgttgtctggatcatccaatttttcgccacctatgtctcgtacgggtatttcgcgacatcaggcctgaataaaattttcgggctgaagcagaaaaagggcgtcatcttcgtaggcatcgcgacattcttggggtcattgatgccaaaggatgcgaacaagctgatgctgttcagtgatattctcggctatatcttcttggttttctttttgctgcctttactgatgtttggagtcgtcgctgtgaaaaggaaggtgaaaaaagcgcaatgaggacatacatcgtaatcatcctttgcacattgcttttggccggctgctgggacagccgcaatttagaagacttgagcctcgttatcggagtcgggctcgataaacccgaggaagaaaatgtggaagtgacacagcagattctggttccgcaaaaagcaagttcccagcagtcgtcgtcaggcgatacgacaaaggtgacttccactcccggggaaaccgtccatcaagctttaaggacggcatcgttaaaaaatcaccccgcattctcccagcacttgcgcatcatgctgttttccgaagcgctgttaaaggatcacatcccgcttgacgcattgatgaaccaatttatcagggacaacggtacaagaagaagctgcaatgtgatgacggtgccggataaaacgaaagatattttcaaaatcagtgaccagggagaacctgcgtcaaatacgatctatgacttaacggagaataatgcggtcaccatccggatgatggagcccgtgacattgggggaaatatcagagaaaatcgccaagggcgagacctttgcccttcctcaagtgcgccaagtgggcagcagactggaaatctggggcgctaccattattaaaaataaattctggtatgcgaatttaacgcctttacaagtccagaatatgaacctgttcacaggcacggtaaagggaggcgtcacgtttgcaaagcatgacaatcattatttatccttcgaagtattttccagcaaatataatgtaaaaacaatatataaacacggaaaattcaagtttatcgttacccggtttgttgaaggccgtctgtctgaggattggaacccgaaagaagattccttcaaagagtcctatataaatgaaatcaaaaacgcggtaaaacgcagcattcattcagatgtcatggcattcattgattacatgcagcatgagttgaaagtggatattaccgggttaggcgatcaagtccggattcattatcccgataaatggaaaaagatatcctctgactgggatcatcacttcagtgaatcggatattgaatacaaagtcaaagtcgccatcagggatttcggaacaaagggaatgtcccaatgaccccgtccctcgggagagtgtgctggcgccgctctccttttcttatgtcacgagatgattgcggtgggcatatacggctgcctgcgtgcggtcactgacatcaagctttgacaatatattcgtaatgtgggttttcaccgttttaatcgtaatgaacagctcttcaccaatctctttattcgtcttgccttccgcgacgagacagaggatttccagttctctttttgtcagcgtttcatgcggaagctgattctctgaatggcgcagccttgacagcacttttcccgccaccttcgattcaagcttcggttcgcccttggcagccgctctgatggcttcggctatttctgccgccttggacgttttcagcaaatagctgagcgctcccgcttcgatcaccggatacactttgtcgtcatcaatgaagctcgtcagcacgatgattttcggatcattgagtgtcgcgcagatctgttttgtcgcttcgatgccgtccatgccgtccatgacaaggtccattaaaatcacatccggcaaaagctttgcggccagatcgacgccctgctgcccgtctgatgcttcaccggcgacttcaatgtccggctgtgcttctaaaaatgcggccagacccatcctgaccatttcatgatcatcaatcagtaacactcgaatcactgtcgttctctccttttgttttctgataaatcgggactttcacgtcgatctgcgtgccttttccctttacggagataatttccgctatgccgccgatttcactcgctctttccttgatggaatgcaggccgtatgaggatgctttcacttgatccatcgtaaaacccgccccgttatcaatgactttaagctgcagtttttgatgtttcgcgccgagcctgacggtgaccttggtcgcctttgaatgtctgaaaacgttggaaagcgcctcctgcacgatccggaacagatggtcttcaacgccttttgacacacccgtatcgctgatgtcccagtcaatatccagcggctgcttcgctttgaactcttttaacagctcaatcagcccttcttttaagccttttccttctaaagtgacgggccgcaaatgcaatagcagcgctctcatctcgttttgcgcttcccccgccatatgttcaaccatgcgaatccgtttgacgattttgtcatccgcatctttcacctgctctaagacggcggatgtcatcatagaaatggcaaagagctgctggctgacggcatcgtgcagatcgcgcgccagccgctggcgttcttcagtgatgaccgattttttcatttgatcctgccattccgcccgttcgttggagagcttttgcagcgatgtgacctggagctcgacccgcttggccatttcgttgagctggtctgccgccagaccgatttcatcatcgccgagcggcggcacccgataagcaaaattaccgttttcaaatttcaaaaccgcttcaatcagtgtatccattcttgttttaaggcggccgccatatacataaccggaaatcaaccccgccgaaagagacgccaaaagcaggatgaccacaaacggaataccgaaccagccggaagaaaacagcagcatcgggtcaagcccgtaatacagcagcatcagcgtaataaacaccgcgcaaagcagcagactgagtcccgcagtcatccgcatggcgcgccactgaatattggcgagtaattttttcctcataaatacttcacatccacatcgccgatgaataacgaaattgaaattttaatccgccgcggcgagtcgccgtactcagacgatactttatacagattcgggctcatgccgcttttcttagagccgagcaggttcatatcgccgataaaagccgatgaactgacggacacttcgatatccggcgggacgtacacatcgacattgccgatgacaccgctgatggtcatcgtgctttctccttcgggaatcatcgcttttgacaaatcaattttcacatcgccgatgaatccggaaacatttaaatcattcagctcaaacgggtccttcatcatccggagctcgccgataaaaaagctgcggaggtccggctgtctgctttccgtctgggcggaaggctttggctgctcttctttttcaagattgattttcttctctttatgttcatacacgcgctttcctttcaggagcctgtagcccgcgtatatgagaaaggcggcgaaggcatagccgaacaggttaaaggtggcgctgaacaggttcctcaaaaataaaaaagcggcgaagatatacaggacggagccgagccagccgcgggaatatttattaaaaatataacctgtgatcagaaaaaagagcggccaaaacaagaagtcgccgatgccgataatacgcaaaaacatgctgacgcctaataaggcgatgataagtccgagaatctgtttttttgccatcagctgcttgcccctcctttccttgactattgcagtgcaatattgccgctcgtcacttttatatcaatcggcctggcgccgctgcctttcatgccggtaaatgccccgccttccttactcgttttctcaaaggaataagacggccggatccttccgcttgccgtctcggcgttcaccgtaaaacttccgtctttcggcagggtgatcgctgcgctgccgctcgcaagcctgacggatacgggagcatccgccttctcaagcgaggcgtcgacactgccggaagcgacccgcacgtcaagggcgcccgacacatgttgaagcccgacatgtcccgaggataagcggacagcccccgtttttgccgcaaggcctgctgctgtgagattgcccgacagccccttcgcttcaaacacatccgtcttcacgtgcttcagcgacatgttcccgcttacagaacggacgccgaggtgcgcaagagacagccccttgtttccgtcgacggcaatgctgccgcttgatgtatggacggtgatgtcccgatgataatcatacggaatgcggacaatcagcagagggcgctgaaagagattcagaaattggaaccctttctccttcgctttaagattgagggtctttcccctgctttggacaaacattttccccgccggtcccgtcatgtttgccgcgatatcattccgcgcttccgcgatgatttttacatccgtctgttccgatgaaaccgacaggctgttgacggcacgcggcggtatgcttgccgattccgcttctgtttcgtacagcggaaaaaaacgcccggcaaacacttctttcaccaaaaacagacagcagatcagaacggacgccgccatcagtcctttggcaatcttacgcttcattacgttccatcctttttcattcattttattataaaggaaaagccggataattgatacgtgcgtatagggaagagtcgtaaacgcgccgatcttcccttgtgcacattattcatgagccgctttttgacgctctgttttttccagagaaagcgagcgcattttttcaatctcagcttccacctcgtctgaatattgggagcggctgtattctgtattcgcctcagctgaagtgccgtatttgacgcggacttccatttcttcaatgcggctttccattcgaaggaactctctgtaggcgctttcgctgtcaattttgtcgaaagaagcgttcatatgttccttcgcatttgccgcgttcgcgcgggcgatgagcgcctgttttttatcctttacgtcacgaaggcgcgtttctaaagtttccagctgctctttcagctctgccagctgtgttttcgcctgctcatacgctttttcatgttcggccgcttttccctcaaggtatttcatttcagagagggcctttttcgccagctcctcttccccggcgtcaaaagcaagctgagcctggtttttccgttttgccgccgtttcggaggcgtcttcctgttttttcttaaactgatggacgatcgtatgctgtttgacaatcgtttgtttcgccttggcgatgtcactttccatatcacgcacatattgattcagcatgactttcggattttctaatttatcaagcccttcgttaacagatgcgacgaacatatttcttattctttttaagaccattttgtcttcctccttattttttcttcagaaattcttcccattcagagtcaaatccggattgatagcccggtgatgccgcttccggttcatactggcgggaagcggtatctgagccgccctgcttcatcatcttccacccgaaatacaccatggcgccggccagtccgatcgcaacgataaatggaagagaaccgacgagaatcatagccccgatgacgcccgcgatgatacccgataccgcccggccttttgaaaaacgtttgattccccagtaaagcatcaggcctccgatcgccagcgggatgataaatgcgaaatggcctcctccgaaaaagacagaaagtccgaacacaatcagcagaaagccgcctgccgttttgccatttatattcatgcagatcctcctttcgttttccttgtctttactataaacaaatcccgcggccggcaaaacgagtcagagattgattttcatatcagaccggagtcgtataagcccccggaccttcgcataaaaaaacgccgctgcaccggacggcgcagggcgttttacgaaaaatctatattctgatgctcgcttctttttccctgatgagatctgagcgttcggctttggccagcttcgtaaagaacaatattccgagaccggacaggacttcaacgagaccgccggcggcaatgacttttccgggaccgaaggcgttagccgcgtatccgcaaagaaccgcgccgagcggaatggatatgtttgagatcatatggatgacggcatagacttgcggctggtcatcatggtccacagacgtctgaataatcgtatattccggcacattaatcgcgctgacggcagatccgaacgcaaacgcggcgaggaagacgagcggcagaaaagtgttgaggccggtgatgaaaaatgccgctccttctatgattcccgctgacacaaacaggagaccgtatttgttcaccttcaccttagccaaaataaaacccattaaaaaggctccgcccgtgcctgtcgctttcaaaagcgagtagataatcggcggcatgtttaaatcttcggcgacataaacggcagagagcgcctcccacggagcggccgcaaaattcatgaagatacaatagatggcgagcgggtataaaatctggtgttttctgacaagaacgaaaccccgtttgagccttccgaaatacgtcccgcgctgtctgacggcgactgtatcctgtttggcatgctggacttggtatgacataaagagtacgagaaaacctgatagaagatagaatataagagcgataaacaaagaataagcgggactgataaatgttaagaacaccccgctcagcgtaatggcggcaagcctgacgatctggcctgatgactggatgaccgcattcgctttctgcaggctgttttctctgacaatattggggattaatgagatagatgcgggattataagcggctcccgtggctgaatgcacaatcatgagaagcatgacaaaccataaaggagaaaaaccgttaaagtaacagaccggaatgatcaacacgaccgccgcgcgcgtcaggtcggagaaatacatccagaatttcagcgtatgctgcttcataaaaggcccggtaatcggcgccagcatcgcctccggaaggaacgtgaccgcaatgagcagggacgtgccgatcgcgccttccccgtcaaaaatcaaaaaccacagaatggaattaaaggcaaaaccgtcgcctgacaatttaaccagccttgagataaacagaagggtgaaatttttattccagatgctctcgctcttaatatatgtatccatctatcaaatcccccattattttacaatgtttcttataatatctcattttttaatttttcagtcaataatgcataagatacattttcctcctgtcaataaaggttcaattgatggatatctctataaaaaaacagccggcttgctgctgccggctgaacaaaacattattcatcatcacggaataccgcggcgcttctttcatattctatatcctgaacgccctgtcttgcgttaaccgctcttgccgccgcgaaaaaataatcagacaggcggttcaagtaacgcatcaccgtatcgtttatctcttctgttttgccgagtttcacgatgagacgctcagcccgtctcgtgacggtccgcgcgatgtgaagctgagcagctgccttatgcccgcccggaagaataaatttctcaagcgggggcgcttcagccgtgtaacggtctatgcagtcttccaatgcggaaatagatgtctctcttaatgcatagcttctatgttcagtgaccgtcgccaagtcgccgccgcagtcaaacagctcatgctgaatgtttcggagttcggctttcacatcactgcaattctcacaatcatcaagctccgcaagcgccagcccgataaagctgttcagctcatcaatcgtcccgtagctttcaacccgcagactgtctttatccgttctgccgccgatcaggcttgtctgtcctttatcgccggtttttgtatacagcttcatcgttgtattcctccttcttccgccgcttttacacatgccgcggttcctcttctgacggctctttccgcgtgagggacgtccatctcctctcctgtctgcaaggcgcaaatgacaatgtcgccttttgcctgtctgccggaaagagcctgcattctcgcttcagccgctgccgttaacagccgtacaaatccctgttccgataaacgtccgctgatcagcacccaaacggtatgctgcgcagtcacggcaattgtgaccgaatcaaacgtacggcagatcaaaccagcggccgctgagccggaaagccggcggctccacgaaaagcccgggccgtcagatgcggttgacaacattctgaacggccgttctgtatgaagcgttacggtatttccgcttttgtttatcaaagaggcgaacggaacgccggcgggctctctttcctcctgcgcttccggcatgaaagcgatcagcggtttcggcgacgattgctgggcaacagctctgacggtgatgccgtaaatgtcttcaatcgtctcttttttcaaagcctgatccggcgtctgcttcggaaaagcgcgtccgtctttcatcatcaggagctgatcacaatattggcctgcggcgtttaggtcgtgaaaaatactgatgaccgtcaggcctctttctctcgtcagccgcttcaccgtatcaagcaggtctttttgatatttgagatcaagaaaggtcgtcggctcatccagacacagcacctcaggctgctgagccagcgcctgcgccagatagacgcgctgccgctctccgccgctcagattgcggacggattgctgcgcataccggtcaatgcccgtcatttccatcgcttcccggacaatgtcttcgtcatgttgatccacctgtctgaagagtcctttttgatacggatatctgccgaaggacactgtttccttaacggaaaatgtaaaggcttgctccgtatgctgcggcaaaacggccatgattttcgcaagctcccgcggcttgtatccgccgacgggcctgcctgcgacgagcgcctcgccttttgacggagagagcattcccgtcagcaatttcatcagcgttgtttttcccgagccgttcggaccgagtatgccgacaaattcaccttttccggcggtaaagctgacatcttccacaatcatccggcctccgtacccgccggacaggctgctcaccctgatcataagcgtttccctccatgatgctggcgaagcagaatcaaggcaaacacaggcgctcccgccaaagccgtcataatgccgatcggcaattcgacaggctcaatgacggtgcgggaaaacaaatccgccaaaatgagaaaaccggcgcccgtcaatgctgacagcggcagtaaatggcgatgatccgttccccataaaagccgtgtcacgtggggaatgacaaggccgacaaatccgatcgtccccgagacggcaaccgctcctcccgtcagcagagatccggcggcgatcatcagccattttctttttcccgtactgacgcctaacagccttgccttttcttctccataagtcataatgtttaattctctgccattgataagcagaagcgccgtcccggccagaaaaaaaggcagaaacagcgcgacatagccccagcccctcattgacacgcttcctaacagccagcggacaatcgggagcagatcattgcccgttaaagcgatcacaagcgatatgagagccccgagaaaagaattcatgatgatgcctgtcaaaatgagcgtcgaaaccgacatcgacgcatgaacgaggcgactgaaaaacagaaccgccgccatgaccgcaatggctgcggcgatgctgacaaccggtagtgtgaaccggccgatgacgggaatctgaatgccgaaaaacaaggtgataacggctcccgccgaggctcccgaagatatcccgagtgtataagggtcggcgagcggatttttcagaagtccctgaaacgccgctcccgcaatggataacgcggctccgacaagggcagccagaacgactctcggcaggcggatattcatcataatatttacattcatagggtcagccgaggatgtccggccgatcccgatccaaaaaacgtcggataaaggaatatgcagactgccgattgaaatgccgagtgccgtacaaacggctaaaaacagcaggctgaccgtgtaggccagcggccggttactttttaaacgtttcaggataaacgctttctgcaagcttctcgacccctttgacaaggcgcgggcctgagcgtgtgacaaggtcgggatcaacagaatagacattgtggtgtttgaccgcattgacggcaccccagccggcgcgtttttccacttcagcggcctttacgccgtctgtcgtaatgatgacgtccggattcattttgacaatcgcttcatccgtcaattgcacccagccggtctggctgccggcagcatttttcgcgtgtatatctttaagcatttcgttcataaacgtgcctttccccgtcgtgtagccgtcaggagacacttcgacgaatactttcttttcgtctttttcagaaatggccgccgctttcttttctatgccggaaaggtcggatttcatcgatttgatcagcttatccgcctgcttttctttgccggccgcttttccgatcatgctgattgatttgtacacgtcttggaacgattgcgcatcattgaccgttaagacggtgatgcccgcatctttcagctgcttcatcgcatcggcggaagcggacatagaggacgcgtgggcaagcacgagatccggcttcagcgcgatgactttttcagcgttcacattcatatctccgactttcggtttttttaccgcttctttcggatatgtatcatttgtcgtgacgcctgcgaccttatctcccagtccgagcgcgtatgtaatttccgtattgctcggcatgagggaaacgattttttccggtgcctgctttatggttactttttcgttcgcggcatccttaatggttaccgggaatgcttcggttgagacggctttttgtttggccgcgcttccttcttcctgtgcgccggaacagccggcgatcacaaaggcggtgaccaagagcgccgcccagacggcagtgatcttcttcattcttttaactccccctgattatggtaaacgattgtctctttgacattcgtatccttttttcgcagtaattatactataagtctttaaggcttgtatatccggcctttttgcatgaaagcaaattgttcgtacacactaaaattcatcatgtatactgttacacaatggtgtaaaaaggaggattatcatggaattacagcttgaacgaaagctcgtgttgattacaggatcaacctcaggcatcggaaaagccgcggcaaaaagctttttagccgaaggcgccgaggtgattataaacggaagaaaaaaagaaactgtggaacggacggttgaggagctttccgcttacggaacggtccacggcatcgctgcggatttatcgcgtcaggatgaggcggatgacttgataaagcgcgcaggtgtaatcggggaagtcgatattctcgtcaataatctcggtttttttgaagtaaaagacttcgctgaggtatctgatgacgaatggactcgatattttgaagtgaatgttatgagcgccgtgcgcctgtgccggcgttttctgccgcaaatgctcgagagaaacagcggacggattctgaacatctccagtgaagccggtgtcaaaccgcttgcgcaaatgattccgtattcaatgacgaaaacggcgttaatcagcttgtcccggggaatggcggaaatgacgaaaggcacaaatgtcacggtcaactccgtgctgccgggaccgacatggaccgaaggcgtcgcttcttacatggaaggagccgcaaaggctgccggagaagacacagacagcttcgtccgggattattttaaagtgaatgagccgacatctttgattcagcgctatgcaaccccggaagaagtcgccaatacgattgtatttctcgcttcatcagcggcttctgccattaatggcaccgcacagcgggttgaaggcggcatcatccgctccatttaacacaaaaaagcccggcacaatgggaacttccccatatgccagggcttttttttacaccatgcctgcaaacggaaccggctcccagccgcccgtctcaagctctgctgaaaacaggccgcccgcatgcggctgctcaagtctttcggcttccgtcaatttttccgtcgcggtcgtaatgtataacgtgttcaagtctctgcctccgaacgcgcagcaggtgacgtatttcgccggaacttcgatagatgcaatttccttatgcaaaaacgggtcaatccggacggcacggccgcctccgaacagagccacccacagcattccgtcacggtcaatggtcattccgtcgggagatccttgcgactccggaaagcggtagaccgttttcggatctgatacggctccggtttcaggatcatatgaataacagacgatttcctgcgtcggagtatcgatatagtacatcaggtttcggtcccgatcccaatccaaaccgttcgaggtggagacctggtcttttattttggcaaggctgccgtccgtattcagacggtacagcgaagcctcctcttctttgccttccatgctcgtcgttcccgcccataatctgccggacgggtcgcattttgcgtcattgaaacggatatcttcccgcatgtctttcggctgcttcatcttcgtcaatgtgtcttcccgaagattgtacaggtaaaaaccgtctttcatcgtcatcaccagctcttcctttgaatacaaggccagagccgtgacaaatgatttgaatttaacggagcggttgattccgtcagccggagtgaagatatgcagctggctgcccagtatatccacccagtacaggcattgcttatccttgtcccataaagggccttctccgataactgctctcgtatctgctcgtaatgctgcttccatatgtgaacacctcttttgcttgtcagtcttctattgttattcccgacaaagcggcgtccaaacttaatcttttttaaaaagaatcgtaatcaccgttccggcgctgattctgctgttgacatggatggttccgttatgaaggtgtaccagctccttggcaatggcgagtccgagtcccgttccttctgacggtcccttcgtattcgttccccggtaataacggttaaacagctggtgaatcgtttcatcgtccattcctcttccgttatctttcactttcagaatgagctgttcggctgattcctcaagcacgacccgaatggcggtccctttcttattatgcttaaccgcgtttgccagcagattctccagaatacggcggaaccacgcttcatcaatggcgaaaagaatgtcttcctttttggtttcaaaggcgatgtcatagccttccgagaacgtgtttttcgtgaaatcgttcgtgacgtttctgataaacggcacgacgttgatcagccgccgttcgatcgggagggccgcgtttttgaggcggtatgttaagtttaagtcctcaatcagcttcgacatatattctgatttttcccggacgatctgccccatttctttgacttcttccgaggtccagtcgtattgcttcgattcgagcatcatgctgtagccgtaaatcgtgctcagcggggtttttaagtcatggctcagcccggcaatccattcttcccttgtcgcctggattttttctctgtttttcttatcccgcttcagcgtgtcagtcagctgatccatcgattcgaaaatctcggcgaaaaagcggaacggctgttttgttttgccttttttgtttttgctgaccggctgtcctttgcggttcttcggctcttcaagccggccctttgataaattgacaagccatttgatggtatgaaacagcggccagccgaaacggaaagagtaccagatggtcaagatgcagatcataaatactaagattccgatcaagaggaagagggttttcatcacatttctcaaaaatgatttgttaaactcgtgatcggggatgtacacggggttcggcaccgacgcgaccatccatttcgttttatcgagtcttttaaaagaaatttcccgtttgtaattccacggcttggaactgtatttcagcaattcaagctcattgacggtgttccgttcttttttcgtgctgttgatatccccgagcagtctgcctctgtcttcgagaaggtagaccgcccctttttcccgtttaatataatcaaccgtgctttttttatattgagaaagggaagcaagggatggctcctgtgattcgatgtaagtgagaagctgctcactggcggatttccagccgaacagaatcaaataggtctcatcatttatcgtgaccgtccagtaattcagcttgtagttgtcaaaattccggtactggtaaatggataagagatcttttctgctgtaatggctcgggacgtctttcggcactctgtacgcgtagtccgttttttcattgtcattaatgatctgcagccagcccttctgctttcggaccgacatctttaaaaactcatcgacatcccatgtgccgtcttcatttttatcaagccacgcttcaaacgagtccgcggtcgctttggtcagtcccgcattggcttccgcttcgctgaaacgccaatccaaatagaagaaagaagcgacggccaaaacggacatcagcaggatgacaagcagcagctgtccgaaaaagtggagcagaaattttccgcgcattctcatgagcgggttcctttttctccttgatcgggaataaaccgataaccgaggccgcgcaccgttacaatataagacggattgctggggtctttttcaattttttctctgagcttgcggatatgcaccatgacggtgttgttgtcgccgtaagacggatatccccatactttttcatagatctgatcttttgagagcaccacatcagggtgttcacagaaatattgaagcaattgcagaagctgtgcggagcagctgacgggctctcccccgacgatcagctcggcgttttgcggtgaataggaaaaatgactgtatgaatacgtctttaccgccgttttctcttcgcgcttataggttctctttaacgtcgctctgatccgcgccgccaattcgagcggattaaacggctttgttatataatcgtcagctcccaatgcaaatcctgacagcttatccgcatcagaagaacgggcggtcagaaaaaagatcggagcgtcggtatagttccggatttcggtgcatgcttcaaaaccggacatgccttccatcatcacatccagcacgagcagatccgcggtttcatgtttaacaaactcgatcgcttcctcagcgcttccggctgtcttaatgttgtgatagccttctttgacgagaacgcgtttgaccatatcaacgatcgccttctcatcgtctacaattaaaattgacgcattttccaccttggacgttcctttctctttgtttttttcatcatatcattatatggataagatttggtacctttttagtgcggaggtcttgcggggaaacagaaaagaaaaacgagaccggacatctcttctcgtttttctcacgttgtcagagcggaatatccatcattccgccgcttttgtcaggagctttcatttataagatgaagtataaattcccaaaaacccggcacttcctggcataacagcatgtccgctttttcaacgatcttaatcttcaattcttgttcaagatcttctctttcctggtatgatgtattgctcagttttttttttatcattggcgaaaaacgcgaaatcaaaagctccatttcgtcggtatctgtgttctctttgttgaagtcaaatggcccgttcactgcttattttccccctttttttgcttgtccagctgctttctgagattgtcgagcccttttttatgaatattggaaatgttctgccgtgattcacccagcgactcggcaatctccttcatcgtcgctccgtgaagataaatattcgtcagcacgcttttttgtttatcggttaacgtctgaagcgcttcgtataaatcacggttttggacatgctggctcaaatccccctgcttccgcagaaactcttcatacgcatcttttcccatttcatagggaagcgcttcacctccctccggctgatccaccgtcagcggatagcgcttctgatttttacggatgcgcttgtcaaaatcgatggagaaaatccggatcatagagttcatatatttgatgatccggatttccttataaaactgtttaaaatggtcgtccagtgattttgcatccttctcgtctgaatgttccagcacatttttaaatttctcgtaatgctttgggtcacttaaaaaatgtttaacgatcggatgtttcataatttccttgcattttgaccgtaaaagaacttgatagtccataaaaccgccccctatttaaattaaatgaaagaaagcaaaaaaaagtaaactactcctttccgactaagattccgcactccttatgtcccggatttgccggaacaaaaaaaagaccctcaaccgggatatcaggtttacaggagccgctctttctttcacttatatacatgactgcaggtcaagtcaggaggtggctgataatggatcaggtttttatagaagaagcggtcagacagctcggcaatctcggctttccggctctgattgccatgtatcttctcacacggtttgagaagaagtttgacgccctgatcgaactgatgacggaactgaaagatcagaaaatgaaaaattaattttcacacgaagttgacttttcatcggaacgcatcacttaacaaagcagaagggaaaacgaaaggcctttcacattctctttctgaaaaaacaaagcttgagaggagacgatttacatgtcaaaagaaaacaactgcaatatcccacagccgatcagaggagacaaaggggcgaccgtcacgattccgcgcaaccttgaaagagaccgccaaaatccggatatgctgacgccgccggaaacggatcacggtacagtggataatatgaaattctctttctcagatgtgcacaaccggctggaaaagggcggatacgcgcgtgaggtgaccgttcgcgagctgccgatttctgagaatctggcatctgtcaacatgcgtttaaaaccgggcgccatccgtgagctgcactggcataaagaagcggaatgggcatatatgctgacaggcaaagcgcgggtcacgattgttgatgaacagggacgcagttttatcgatgacgtgaaggaaggagatctgtggtacttcccgtcaggcctgccgcactccattcaggcgctgaaagaaggctgtgaattcctcttggtttttgatgacggttctttctcagaaaacagcacattccaagtgactgactggctcgcccacacaccgcttgatgtcatcgccaacaacttcggggtttcagaaaaagacctcgccggcctgcccgggaaagaaaaatatatctttgaggagccggttcccgggaagctgaaagatgacattgtggaaggcccgaacggtgaagtgccttatccgttcacttaccgcctgctggatgaaggtccgactgctgagacggatggcggcaaagtatatatcgcggattccacaaacttcaaagtgtccaaaacgatcgcttcagcgcttgtcgtggtcgaaccgggcgcaatgagagagctgcactggcatccgaacacgcatgaatggcagtattatatttccggtaaagggcggatgacggtttttgcatcggacggccatgcaagaacatttaactatcaggccggggatgtcggttacgttccgttcgcaatgggccactatgtggagaatttgggagatgagccgctcgtcttcctggaaatcttcaaggatgaccactatgccgatgtgtccctgaaccaatggcttgccatgcttcctgagaaattcgtccagcagcatctggatctgggcaaagactttacggatattctttcgaaagagaaacaccctgtcgtcaaaaagaaatgctgaagatacacaccggcttgcagagttccgtctctgcaagtctcctctgtgtgaaaaggagctgaacagatgatcaatcaaaacgggacgaaaatgttttttcttcatgtgcttcggtatgccctggcagccgctgccgtattattcgggtatttcatcgtgatgatggccgtattttcattagccgggacgagctacggatcgatggcgtacgtcctgcttttttccgtgctttttatttttctcggtttatgttttgaaccgcttgagcggctgatgatacatagctttaccttttttgggacgggcaggctgccttttctccttttagccagcaccgttcagctgctgttcctctggatgaccgcgtatacgacggataaactgattgaaaagatttggctgtcaacgacggaggagctgattgtggcgggggtttttttcgttttggataaatgcgtctccggagaaaagcagacccgggcgcaataaaaaaacgcaggccggaatggctctgcgttttttttcatcataccgttgcgctttcatgccggattaaatcgtaggttaagcagaccggtttgttcgtgcgcggatcttttacaatctgtgcgtcaatttgaaaaacgtctttcaatatgccgggagtcatgacttcctccgccgttccttccttgatgacgcgcccttttttcagggcgatcatgtaatgggaaaaacgggcggcatggttcagatcatgaatgaccattaaaatggtgcggccctgctccttgtttaatttgtccagcagctgcaaaatttcaagctgatgggcgagatctaaataagtggtcggttcatcaagaagcagcagctccgtttcttgagcgagcgccatggcgatccacacacgctgccgctgccccccggaaagcgcttcgatcggccggtcgtaaaattcggccatccccgtctcttccagcgcccatttgatcatgtcacggtctttatcactcaaacggcccattccggactgatgcggaaacctgccgtaagaaacaagttcgtacaccgtcagcccgctcggcgcttcaggcgtctgcggaagaattgccatttccttggcgatgtctttcgtggatttttgcatgatcgcctgtccgtttaaatagacggcgccggatttcggtttcatgattcttgacatcgttttgagaaccgtcgattttccgcagccgttcggaccgatcagtgttgtaatttttcctttcgggatggcgatatccaattctttcgctatcaaacggtcgccataaccgacagtaagctgttccgccgataatgagttcatcgcggcagtctccttcctctatttcgttttcatcagcaaatatacaaaatacggcgctccgagcacggaaatcaccaggccgacgggaacttcggacggtgcaagcacatttctcgccagcgtatcggcaagcagaaataaaaatgctccgattaaagccgaaaccgggataagcgtctggtggcgcggtccggtaagccttctggccaaatgcggcgcaatgagtccgagaaaagcgattccgccggctgccgcaacacatgacgcggtcagggcaacggcgcacatcagcagaacgcgccgctccttttcaacccgggtgccaagccccgccgccagctgatcaccgagctggagcacatttaaatacctggctttatagaggctgaacggtaaaagaaccagcagccacggcaaaatggacagcaccattttccaattggcgttccaaatcgaaccggaaatccatacaagcgcctgcatgaaatcccgcgggtccattttcagctgaaaaatcaagagcagcgcattaaaccccgcattgacgccgatcccgaccaaaacgagccggacaggtgaaacgccttttttccaagccagaacatagatgagcagcgcagccagaaaagcccccgctaaagcgctcaccggaagcagccatgtaccggccatgcttaaatcagcagctgatccttggaaaaagaagataaacaaaacgaccgccaaagacgccccggcgttaatcccgagaatgcccggctccgccaagtcattttgagacacgctttgaaaaatcgcgcctgaaactgcgattccggcgccgaccagcaatgacagcaccatgcgcggcagtctgaattcaaataaaacgagctgatcccgggcatccccctgtccgaaaaagacacgtagcgtatcaagaggcgcaatccggatcacgcccatgtttaagctgataaaaaagacgatgcatatgagcaaaaacgtaacggccatgaccgccagcggttttttcgattttacattcattacagccctctcctttccctgcgcgccaaataaaagaaaaagggaacgccgataagggcggttaaagcgccgaccggtgtttcaaacggcgcattgacgagtcttgcggcaatatcactgaagactaacagaacggcgccgaataccgccgaacagggaatgatccacctgtaatctaccccgactaaaaatcgggtgatatgcggaatcaccaagccgataaaagaaatggctccggcgactgagactgaagcccccgtcaagaggacaacgacaaacattccgattactttcacaagcgatgtgtactgcccgagccctttggccagctcctcacccaagctcagcaccgtcactgagcgcgcaatcagaaatgccagcaaaagtccgataaccccgaccgccaacagcagctgcacgccttcccatttcacggaagcgactcctccggcgtaccagaacttcacatcctgggcgacatcaaaacggatcgcaatcgcgcttgaaagccccgttaagaaatagccgactgccgtaccggccagcgcgagcttcaccggtgtcagaccgccttttgaaaacaggccgatgccaaacacaataagcgctccgattcccgctcccgcgaaggaccacaaaacaagtcccgccgcagacaggcccggaaaaaaagcaaacgccaatgcgatcgcaaatcctgaccccgacgtcacgcccataatcgaaggctcagcaagcgggttccgcgtcagcccctgcataatcgccccggacacagctaaaaaagccccgacgagcgcggcggcggcggttctcggcagcctcagatcgcgtatgatttgatgagatgtattttgcggctgaaagtgaaagagagcatcccacaccgtccgcagatgaatatcggcagctccgatggaaacagacagggccgcgccgatcaataaaaccgcaatcccggcacacagcagcacagccgctctgaatgaacgcgccgtccactggatttcactccctgatgcccctagagccgtcattgtctgtttctttttcaatagacccaacactcgttcttcctttctcaaaacaagaatggtaatgataatgattatcaatgacttgtttcagtatagcacttttatcttctcttttaatagacctaatttcatataaaaaaagaaagtttttcttaaaaaagagcgtgcttctctatgaaagcagtgatataatcacactgataatgattctctttatcactaattttcatgaaagaaggaatgtcagatgttccatacatacaagaaaatcggcgcagcgctgattgccatgctgctcatcgccgctttggccgcatgcggcaattcttcagacacgaaaggttcttctgaaaaagaagaaaccatcacgtataaagccgaaaacggcaatattaaaattccgaagcacccgaaacgggtcgtcgtcatggctgacggctactacggcgactttaaacagctcggcatcaatgttgtcggcgcgccgcaaaacgtatttaaaaacccttattacaaagggaaaacaaaaggtgtgacaaacatcggcgacggcacgtccgttgaaaaaatcattgacttaaagccggatttaatcgtggtctggacgacacaaggcgccgatattgaaaaactggaaaaaatcgcgccgaccatcgccattaaatatgacaagctcagcaacattgatcaattcaaagagtttgcgaaaatgacaggcactgaagataaagcaaacaaatggctggctgaatgggacaagaaaaccgctgccgctaaaacaaaggttcaaaaagcggtcgggtcaaaaaccatctccatcatgcagacaaacggaaaagacatctatgtattcggtaaagacttcggccgcggcggaagcatcatttatgacaaactcgggctgaaggccacaaaactgacgcaggaaaaagccattaatcaagggccgggctacgccagcatttcactcgagaaactgcctgacttcgcgggagactacatctttatggggccatggcaggccggcggtgacgacaaaggcgtgcttgacagctcaatctggaagaacctcgatgccgtcaaacaaaaccatgtctaccgcattgatccgatcggcttctatttctcagacccgatctcacttgaaggccagctcgactacatcacaaaaagcttaacaaagtaaccccgaagccgctgtcacagcggctttttattacgcttaaaacttgacaaaaaaatttatttatgctataatttacatttttggattaacatgtataataagattctcccggccggagattgatgtaaataacggaggatctttatatgaaagaaaacaaggcgagtatgacttccctgctgtccgctttcggaagggcgtaccacagtaaatacgacaccccggtgatatttgatgattttatggcacaagatctgatttccgaaaaagagcattcggacatccgcgatcatctgattcaaggtatatcatttttcagtaaagacatggcacagaggcttcaaggccaaccgaatgacatcttaaaatgggtgactcaagtacagctgtctcctacaccgttagcccgtgccgcatattgtgaagaagtgcttttgaatgaagtgaagctcggggccaaacagtatgttatccttggcgcggggctggatactttctgtttcaggcatcctgagatgacaaacgccttagacatatttgaaatcgatcatcccgcttcacaggaagacaaaataaacagattgaaacatctgaatctcgacatttcccatcatcttcattttgtaccgatggacttcgccgcttcgctttctttcagccgtctgtatcaggaaggtttttcacgccaaaaaacctttttcagcctgctcggtgtgtcatactatcttacgaaagagcatctcgcccgcctgctcacacaattatttgccgaagtcccgccaggaagctctatcgtgtttgattatgcagatgagtcgctctttgaagaaagaggactgtcaaacagagtggaaaacatggtgaaaatggctgcagcaagcggagaaccgatgttatcgtgtttcagttataaagaaatcgaaaaaatattagaatcatcaggtctgcttatttatgaacatttatctccggcggacgtcaatgaccgttttttcagcggacgcactgaccatttaaccgcattcgagaccattcattatatacatgccgtcaaaaagtaatcagctgccgcaaacaaaaaaagacatctcacagacgtgagatgtctttttgtcataccgattgtctgttatttgcaaatttctttgagacgaaaggatataacagcaaaccgacgaaaaacagcccgataccgagaataaaggtcgttaaatcggccgttccggtaataatgacataaaaagaataaatgcaggcaaggatggcgatgataccgtctcttactcttgaaccctttatctcgtcatacgtttcacccgtaaaaatgagcttcaggctgtaaaacgctgacacgagatacggaatcagataagcgagcgtcgccgccgtcgttaaaaacgtaaacgcgtcactgatcgtccgggaaataactgaaaagataaagatctgtgacatcacgttcgttacgattaacgacacaaccgggctgccctgtttattcgtttttgcaaaagcagcgggaaagtctcctgatttcgccgcttgatacggaacttcagagccgagaagaatccagccgagcatcgttccgaacagacacaaaatcgccagaatcgccatgatgacgcttcccgcattgccgacgatcgcgtacaatacgtcaacaaacggtttttccgagccgacaagcttaccatgcggaagcacgcccatcgtaatcaatgtcacgatgatatagatgccaagcgcgatcaataatccggtaatggtggcgcgtttcacgtcacgctgcgaacgggcgcgcccggataaaatgactgccgattcaattccgacgaacgcccataatgttgaaatcgccgcattgtggatctgtccgccgattccctcaactgtgtgaggacctgtttgaaccggaaaataaaaatgatcgaaaaacgacgtttgaaacacaaataaacctgcaatgataaagaagataaatcctaatacttttgaaaacgtcgtgacgaaatttaatttactcgcaccgttaatgctggtgacgagaatcgtgtgagtgccccataataaaaccgtacatacggcaaacgtcagcagctggccgagcgtaaccgcctgaccgccgatcgaaaacatttcacgcttatccgttaaaatcgggaaaaatgatgttaaatatccggcaaggctcgtgatgatcgccacgttgctgatccagctcgccacccagtagccccagaccatcgtgaagcccgctgcattcccttttttccgatcgctgaacagcgcacgcgcatagctttgcggccccgccgtcagctcaggcttgcggatggataagtggccgaagaccagcgcgatcattaacacaccggctcccgttaaaagccatgccgatgtagcgccgaacgggctcgcgatttttgcgagcgtactcggaagcgaaaagatgcccgagcctaccatatttcctacgacaaacgccgttaataaccaaaaaccccattttttcgtctgttccattcctgtacctcctggttgttcattcgtacggaccagaccccgagatcatatttacacgcaaaaaaagcctgaacaaaagtccatgcttaaagaaacacacacacccttgatctccggatagccctccgcgaaaaagcacgcggcagtcctgcacttattcagatacagtcccagcataaagaaggatcggctttctttacacttcggcgctgatgcctttaacacatgttttgcggcccctatcagcctggcatgtgcgactcatcatcaagcgcaacctctacctcaccgagaaagagtgaggatttttatcattcaattctactcagaggttatcagagataaaaagatctgtcaaagggaaaaattagatggaaaacggatagagcgttcgccctacccgtcttatatggtcagcggttgttttttttcttttgaacagcttcttgaagcggatcgtctttcagagctgcaccggcgtcttcaagcgcgccttgaatgacgtttttgtttttatcgctgttttttcctttttctttgttaaagaaagccatctgtatcacctctttatcaaatataggtacacctataatgtgtctttttccgcggcagaatatgcggaatccccgtctccttccttttggcggaacaggtaaagtttgttgatcaaacatgcattctcttgatatatttgtaattcaggggattttggcaaaaataaaaaggagaagcgaaaaatgacaggaaaaacacacatcatgggaggcatcgcttcttgttccgcaattgcgtattattacgggtatgatccggtccttatgacctcagcgggtgccctcggggcgctgattcccgacatatgccatacgaaaagcaaaatcggcagaacgctgcccgttctgtccaaaatcgtaagcacggtgttcggccacagaacgtttacacacagcctgctgtttatgcttattatgtttttcattacggcaacttatattccgaatccgagcatttccgcaggactgatgatcggaatggcgagtcatcttgtgcttgacgcatggaccgtcaacggcattaaactgctgtttccgtccgccatccgcttccgtcttcccctttatatgagaacggggagtttttcggagcagcttgtgctggccggcttaacgattgtatcctgctattatttatacgaactggttcacggccgcatctcttaaacaaaaagcatctttcgcttttagggtgaggagtcatacatatgaagaaaacctttttcagcaatcatcggtttttatgcctgtccatcctgttcatgtggatgaaaacctatgccgtttataagctcggttttgatctgcagaacaattcggttcttgaggaatgtctgcttctcattaatccgctgagcttcattgtgccgctgttcggcatcgccctcttgctgacagaaaaaaaacagcggatctttctgctttcggcaaatgtgatgctgacgggaattttaatcgcgaatacggtgttttacgggttttatattgattttatcaccataccggttttgtttcaggcgagcaatatgggtgatatgggaagcagcgtccaagagctgtttcacccgctttatatcgctttatttttggatattgcggttttgttttaccttggtaaaaggcataaagccgataaagggaaagccagcacccgtaccgttaaagcgtatgcgtgggcatcagccggcctcatgctgtgcaaccttgcactgtctgaggccgagcagccgaagctgttcaagcacccttttgatcgtgaagcgctcgtaaaaggaatcggcctgttccactttcatttgtatgacaccatttcgcagacgctgaatgcaggggcaaaagcgtttgccgatgaagacagccttgcggcggtcgcgaattacactcaagccgactacagcaggccgtccgaatcaaagttcgggctcgcaaaggggcgcaatgtgatttttgttacgctcgaatcaacacagcgttttgtaatggatgagcgggtcaacgggcgggagattaccccgtttttaaataaactgcggaaaaaaagttatgacttcactcatttttatcagcagactgaacagggaaaaacctcagattcagaattcattactgcgaattcgctgtatccgtcttcaagcggcgccgtttttttcacaaaaagcggccaccggttcaatacgatgtaccatatgttaaaagatcatcaatactattcagccgttctgcatgccaatcataaggccttttggaaccgggatgagatgtacggggcattcggaatcgaccgttttttcgacgcggatgaatttaaggtgacacaggaaaattcaacaggctggggcctgaaggataaggaatttctcgaacagtcagcggaaaaattaaagaagcttccgcagccgttttacgcgagcctgctgactttgaccaaccattttccttttgaaattgataaacaggatcagctcattgaggaaccggacacaagcagcgagttattaaaccgctatgtgacgacggtccgctatgaagatgaggccctgaaacactttttcaagaagctgaaaaaagaaggactgtatgacaacgcgatgatcgtcctgatgggagatcattacggtatatccgaagcccataatcaaggacttgccgaattcttagggaaagaggaaatcactccgtttgatacggttcagcttcagcgcgtgccgtttatcattcatattcccggggtgaccgaccgtgcgccggaaacgattgcttcggccgcgggacaggttgatgtaagaccgacgctgcttcacctgctcggcattgaaacgaaaggcagcattcagttcggcaatgatctgttttccggagagcggaccccttttgcggtgctgagaaacggcagctttatcacggatgatcatatttatacgaaaaatacgtgttacagccgtaaaacgggtgaaccgctttctgacatgagcgcgtgcagcgatgagaaagaaaaagcggaacaagagctgatgctttccgataaaatattaaacggcgacctgctgcggttttataagcaataaaaaaatccctccgttatatggagggatttttcatgtttcatatataagccgtccggtcattttcgtatcatatccggataattgagaaagctgagacttgaattcctcagaattaagaatgtcctgcacgctttgaacaagctcccggttttgttttaagacgaccacatcgtactgctcactgatcaccgggataaagtccgtgcccgccatatgcgccgcatgctgcgacccgactccgatatccgcctttccgcttgatacttgtgaagccgctgacagatgatccgtgacaatgtcatgatagccggcgacatcagacggcgtaatgctgaaagatctgagctgttcatccagcagcaccctcgcgcctgatcctttttcgcgattgacgatgcggacatcttttcggctcatgtcctgaaaaccctgaatgttcagcggattaccttttttcacatataatccggcctgccgcagcacgacatgaaaaagcgcaaacggctcccctgaaagaatgcgcttcacgtacgggatgttatactgccccgtctccccatcgtataaatgcagactgacgatgtcacaggccccgcggtacatctcgatcaggctgttcaaactgccgctgtacttgcggagcggagccgcctgtattgtttgttccagctgtttgctgaggaggtccatcgacacatcctgcccgctgatgataacggactgccttttttccggctcccgcccgcgggacgggtcaggcgcttctgctgcggatggcttttttgacattctcatgtttgctttatattgttttaagtcctcttcatcgaccctcatctgtcttccgaccctgtacgccggaatgagtcctttttttatcaaatcatatactgtcagtttggagaccttcaaaaggcccgcaacttcttctattgtataggaagtggcttccgtcatattatcacgctccgtttttattataactgttcagatattgaaaaaaaaccgcaccatcacgtacaattgcgttataattagtttgatctaatgatatttagctataaggggtgcacaatgttgaaaaagaaagcgacactactcacaactgcggctatggccgttttccttgcaactgcgggctgctcatccggacaatcgtccaaaggcggacaaaacgaaaaagtcacgctgaccgtctctgcggcagccagcgctcaggatgcacttgaagaaatccagaccaactacgaaaaatctcattcaaacgtaaccattcaagacaacttcggatcatcaggcacattgcaaaaacaaatttcacaaggcgcgggagctgatttattcttctcggcagccgaagataaattcgaaaagctcgttcatgacggagatatcgataaaaaggacagcacggatcttttgaaaaatgatctcgtcatgatcgtgcctgagaaaaacagcgcacacctgacacatctgaatgacctgaaaaaagacagcacggaaaaaattgcgctcggcacgcctgaatccgttccggccggacaatacgccaaacagtcattgacggcattatccctgtgggacaaggtaaaagataaagtcgtctatgcaaaagacgttcgccaggtgctttcttatgttgaaaccggaaatgtcgatgccgggcttgtctataaaacagacgcgctgatttcgaaaaaggtgaaaatcaccgatgaagcgccggcgaaaacgcacgatccgatcgtttatccgctcggcatcgtcaaggatacaaagcaccgtaaagaagcagaagcgttttatcagtatctgcagtcagatgaagcaatgaaagtgtttaagaaatatggatttactgccaagtaacattacggcttcggaatttttcaccccagtcgtattgtcttttgaggtcgctttggcatcaggcatcgccgtcatcattctcgggacgcttgccggcgcctggatggcgaaagcgcgatttcccggaaaaacggctgtggagaccctgtttatgctcccgctcgttcttccgcctaccgttgtcggcttcattctcattattattttcgggaaacacagctttatcggccgggcgattgagcggatttttcaccagcccgtcattttaacgtggtcggccgcggtgatcgcttcggccattgtcgccttcccgcttatgtatcagtccgctaaaacgggcttcgccgcggttgatgccgacatcgagggagcggcgaaagtagacggagccggcaggtggcaggtgttcacccgtatttccgtcccgcttgcctttccctccctcttgaccggaagcattctcagtattgcaagggcgctaggtgaattcggggcgactttaatgtttgcgggaaatattcccggcgtcacccaaacgctgccgacagcgatttacgtcgcgatggactccggcaatgaaacactcgcctgggtgtgggtgatctgtattgtgatcatttctttcctgatgctgtttttcatccaattgaaaaaacccgcttgaccgatccgccttccgcgcacctttcgccgggaggctttttgatttaaaatcggatggtatataatgaaacaaaaaacacacaaagggtgcggccatgaagattaatgtcattatcgcggatgataattctttcatcagagaaggaatgaaaatcattttgcatacatatgaggaatttactgtatcggcaacgttggaaaacggcctggaggcggccgagtattgtaaacacaatcccgtcgatatcgccttgctggacgtccgcatgccggtgatgaacggcgtcgaagccgcaaaacggatcgcggaggaaacggatacgaagccgatgatcctgacgacatttgacgacgatgagtatattttagaagcgattaaaaacggcgcgaaaggatatttattaaaaaacaccgaaccggaacggatacgcgatgcgatcaaaagcgttttcaacggacacagcattcttcaggacaccgtgctggataaaataaaagacagccttttccggccggcggaagccgcgcatcagattgatgaaagccagtttactgaaagagagctcagcatcatgtcgcttattgcgaaaggactgtcgaacagggaaatttcaaaacagcttttcatttctgaagggacgacggccaattatatttcatctattttaggaaaaacggggcttgagcacagaacgcagatcgcgatttattatatcaccgggaaggtggataacgggcgttgaacggtatggatttttggatgctgatgagcagactgattgccattttttatacggcttttttgttcgtatcggcagaccgcccttacacgccgtatgccgtcttgtttctgctgctttatctgtctttgggcattgcggtctgcatgatcaggccgcccgcttggaggcgcgggatcaccctcatgacgctggcattgactgcttggctttccgccttaggccatccggcgtttctgtttcttttaccgcccgccatttttgcggttcttgccgaatatccggttcaccgctatgtgttctgcctgctcgtatttttgccgtttttatttatcccgtacggcgaccttccgacttatatcgtcatgaccttgttctgcttggcgatattcgttttggccgcccggtccagcgaccggctgaaaaaatatgaagagcagtcagacaacatgcgctcaagcattgaaaaactgacgaaacagctgcacagcagcacggaatatatcaaacaatcggagtataccggcaaactcgaagaaagaaacagattgtcccaagccatccatgacaaaatcggccattccatgacaggcgcgctcattcagatggaagcggcgaagcggatgctcggctcccatccggacaaagcggctgaactgctccaaaacgccattaccatttccaaagagggcattgaggatatccgcataacgctgaaaaatatgaaaccgcccgctgaacaaatgggcattcacagattaagaacgtttattgatgaattttcggccaaaaacgggatgccggttccgtttacgcatcaaggcgatttggacaggctgacgcaaatgcattggagagtcattcaggaaaacgtaaccgaagccttgaccaatgcaatgaaatacgccgatgccacgcagattttcattgatatccatgtgctgaataaagccgtgaaagcggaagtgaaagataacggaaacggcgccgtccgctttaaaaaaggcctcggcatgctcggtatggaagaacgggcggccgtcctgcacggaaccgttatttttgacggcacggccggtttttccgtcacgacattgcttccggttgaataagtgaatgttttcatgtgaaaaatatgaagattctcatgtcaaaggaatgaacagctgcactaacggccgttcattcttttttttataataagagcatcataagacatagaggtggaaacatgaacattttggagctcaaacagctgagtaagaaattcggtgattatgccgccgttgaccagatgtcgcttgccgtaaaagaaggtgagattttcgggtttctcggcgcaaacggagccggaaaaagcacgacgatcaatatgatctcaggccttttaaaaccttcaggcggagacattctgtttctcggaaaagatattttcaaatatagcaaagcaacgaaaatgaatatcggcatcgtccctcaggacctcgcgatttacgaagaattaaacgcctatgaaaatgtgaagttcttcgccgggctgtacggcctgagaggggcggctctgaaagaacgggtcgaggaggccctgacattcgtcggcttgagcgataaacacaaatatttgccgaagcatttttccggcggaatgaagcgcaggctcaatatcgcctgcgcccttgcccaccggccgaaactgatcatcatggatgaaccgacggtcggcattgacccgcaatcaagaaattatattctgcaatcagtgaaaaagctgaatgaaatgggctgcacgatcatctacacgagccactacatggaggaagtggaagaaatatgcacgcgcatcgccattatcgaccatggaaaagtcatcgcagaaggcacaaaagaacagctgacctccatcattaccgacacgaaggacgtcgtgattgagctgtcatccggaaacggcatcagcctcggcgatattcaggagctgcccggcgtcagagccgccacactggaagaaaacagcgtgaaaatcagctctgacacaggggtcaacaatttaaaccgcctgatccggtacttcatggacaaaggaattgaaatccgctccttgcaggaacaggcccctgacttagaaacggtatttctcacgctgacaggcagaagcctgcgcgactgaccccgctgaaaggaggattgcaaatgaatattctgcacatcgccgggaaagaaatcaaaatcagtttccgcgacagacggacttttattttcatgcttgcttttccgatcgtcttcatgctgattttcactgcggcattatcaaacgcctttgattcagaggtgacggtcggaaacatcaaggtggtatatacggaccagtcaaacggccctctttctcatgattttactgagtttatgaaagccgccaaaaaagagcatgtctattttcaaaaagcggacacggaggcaaaaggcaaaaacgaggttcgagaaaatcaggcggatgctttcgtcactgtaaaaaacaccggttttcaagtctttacaaatgaccggagcggcataaacggcacgatcgtccaaggcatgctgaccgcttttaccaatcaatacaaagcaggcgccgccgcttacaaggcgcataaggcgccttccgccggacaaatcaaaagcgattatatgaagcagacgtctttacacaaagcgaaagaaccgaaagcgaaagatttttacgcgatatccatgacgacgatgatcgggctgtacgcctcgatttttgcaagcaccttattccgcggggaaagaatacggcacaccgcagatcgcctgatcgccgccccgctccggaaaagcgatatctttctcggaaagatgctcggcattttggctgtgaatgttctgacgattcttgccgttgtcgccttcagcaaatttatcttaaaagcgaattggggcagccacatgggacttgtgcttttgattctcgtttctgaaattcttttggccgtcagcttcggactcagcctgagctatttgaccagaaaacccgaaagcgccagattaatcaccgtcatcatcgttcaggtgatgtccattatcggcggcgcctattacaaatatgaaggcggaggaatttccgccctgtcgcccttatcctggatcaataaggcgattaacaacatcatttacgcaaatgatgtatcagcggcatggcctgcactcggtttaaatacagcattggcggcactctttttgctgatcgccgcatttacgtttcaaagacgggagggactgtaatatgaaaaacttctggtggctgtttgcgcacactctcaaagggattacaaaaagcaaaaaacagctcattctttatatcggggctccgctgatcggcgtcttcctctccttcatgaccaatgccaacggcggagccgaaacgctcaatatcggcattctcaatcaagacggcggagaagtggcacaggatacggccgcgtttttaaaaggactggatcatgtgaagatttcggaggaaacagctgcgtccgcctcatcaaaaatcgcttcaggaaaaatggaggcgctcattacgtttgaaaaaggcttctcccaaagcgtaaaagacgggaaaccgtctcacatcggcatgacctcgctgaaaggcgcccaggtcaccggatatgtcagctcttatttgtacaattatatgaacagcatcgcctcaatcggcaaatcctccggcggagacgcaaaggcctttcaggcgatgtacgccgatttcaagcattctcccattcaaacggagtccgctgttttacaagatacatcgaaccataaagaaatgacttactcagtcatcgggtatctcattatcattatgctctattccgccggcaacctgacggaactgatgattaaagagagagaaaacaggacatactacaggcttctgtcaacgccgatcacatcaaagcagtatgtattggcgaacgcggcggtgaatatcattatcatggccgtccaaattctattcgccgttctctttatgggcgccgcttttcatattcatccgtcattcccgctgtggcagctgttcgtcctgatgatgctgtttgcattaagcgcgattggggtcgcctttattgccgtcggtttttccaacagcagcgcttcggcatcggcgcttttgaatttgatcgtcgtgccgacatgcttgctggccggctgcttctttccgggcaatattatgccgaaaacggtgcagacaatcgccgaatttctgcctcagcgctgggtgctcgatacggtggatcaattgcagcaaggccgcacgttccaaagcctgatgctgaacatcatcattttgggagccttcgccgccgccctgttattaatagccgcatacaggttcagcgtaaaacgtcagacacagacatttatgtaaagaaaaacagccccgtaaagggctgttttttcttagaacagaagctcgtccggattcgggccgacacgctcgtctttgttcaatgcgctgatcttttccatttcttcctgtgacagttcgaaatcaaaaatatcggcattttctatgatgcggtgctctttaatcgatttcggaatggtaacgacttcgttttgaagatcccagcgcaaaatcacttgagcaaccgatttgttatgtttttccgcaatttgtgacagcacttcgttatcgaggagctgtccctgcatcaatggagaccatgcttccacttgaatgccctgcgctttgcagaaatctcttacttctttttgagtcaggcgcgggtggaattcaatctgattgaccatcggcttgatttcagcatctttcagcagctcttctaaatgatgcacttggaagttgctgacgccgattgcgcggattttgccgtctttgtacagcttttcaagagcgcgccatgtgtctttatatttatccttgcccggccagtgaatcaggtaaaggtcgaggtaatcgaggccgaggcgctcaaggcttttctcaaacgcgtcaagtgtcgtttcgtatccttgatcttcattccacacttttgacgtgatgaacagctcttctctggcaacgcccgcagctctgatgccttcgccgacaccctcttcatttttgtaaatagccgccgtatcaatgctgcggtagccgtttctgattgccgcttcgacggagtccgccgctacgcttccgttttccaccttgaagacgccaaggccgaaccacggcatttcaacgccattatgaagctttacagtatcttttaagctttttgccacgttgaaccatcctttctagtcattatgtaaacggttattattatctcacatttccgccgtaagaaaccaattattcgctcatcgttatcacaaaaaccatctttagtgcccaagcaccactaccgttattattttcctatttttcaaaaatcctggttaaccgggtaactgtccgggtaaatcgctactgtagccaccacacaattgaaggaggaaatcatatgaaacgtatgcgtatcccgatgtccgttgcccttggcgccgctttgtctctgactcctctgtcctttgtatccgcaaaagaaaccccggtccctcaaaacatggcacagcaatcatcagatgtctcagcaaaagatgtcggattaaacattgacgttgacctgctcggcatcggcaattcgattgctgacgcgattaagtcggcgcaaaaccgtgacggcttcgtcaaaaacttaatggaatcttcattctacgcttccggacaaaaatataacgtcatggtgtttaatttaagccaggaatatgaagatcattttaacggtgttcagttctacggttccgccgtttatgacggcatcacgtacggcatttgggtgtttgaagacggaagcttcaccaataaaggtgatggcggctggatcaactgggccttcagaggctggtttgaccgcgacggcgatcacgtcgaattccatcgtccgtaatcaaaaaaagtccggcgacagatgccggacttttttgatttattcatctccgtcaagcatggccgcttccacatcattgatgtattggcgaagctcatgtgacatatcgcgggaaatttcccgctcttcgaacaatgtttggatttcgttgcggatggcctgcacggcccgcagtttgatttcgagtttttgattttcaaaacggcggctcggactctgttcgtgatacgtgtgccccagcctgaaaatcaagtgattgtaaaaggaaatgacggcaagcgtcacatctttattttcttcagtcatgtgttttttcaggctttcaatggccgcttttgccgttttaacccttgtggtgcggatgaggccttcttcatttaaaattgacatttccggctttttttgttcaccgaaaaagatccagtacaccaggcgtttcagctttttcttagataagccgactttaaacgggttcgtatacagcacttccagttcatcaaaccgttcctgaaggctgtcagccgtttcttccggtatgtcgccccgctcaatcagccgcagcaattcttcctgttcagcctgtatcccttgggcgcggactttccgctcatcttttttcgtgcggtttttgacggtgaactgctgaaacctgagatttttcattttctcattgtattcggcaataaccgcaaaagaagccgttttgtttgtctcattcatattttctttaatggcggttaaggcagcttttatcagcttccgtctcgctgtcagcaatttgactttcttctctttcacattgtcttccggcttatctgtcaaaatcggcagtacgattgtcgccagcaccaatgtgcacataataacacccgcggctaaaaagagaatcaaattccgttcaggaaacggtgagccgtcagagagcacgtaaggaatggaaaaggaacccgcaagcgtgaccgctcccctgacgcctgaaaccgaaatcagcagggtcgtgcgcaggccgggtttataaatgctctgatccttgttaaaaaaccacttgccgttccaaaaaaacagcacccacaaaaacctgagaatcattaacgtcagcgtaatgacgataatgtacccgatgaccatcatattgttaaacgcggtatcattaaagatgacagaaaccacatccggtatttgcgcacctaaaataacgaaaacaagaccgttcagaatgaacaaaataatattccacgtacttgaagagacgatttgcagtttgaccatcgttgattcaagacggtcctgctccaccgcatgcgtgatgccgccggccacaacagctaaaatgccggaaacgccgatttcttcagccgcgagatagatgacgaacggcgtcagaatttgaatcagcatatgcatcgtgacatcctgcatgccgaggcggcgcaaaaacagccggaaacggataatcaaaaaagaaatgacgacaccgctgagtaaaccgccggctgaaatcagaacgaaactgaaggcggcctgcgccagcgaaaatgcgcccgtcacggcagccgcaatcgcaaatttaaaagcgaccaggccggatgcgtcattcatcagtccttctccttcaaggagacgcagaatgccttttggcatcttcactcgccctgacagcgcgctgaccgcgacaacgtcagtcggtgacagtatcgccgccagcccgaacgcggcagccagcgggatgctcggaatcatccaatgaatcgtgtaaccgccgacaatcaccgtggcaaacacgagcccgagcgcaagcagcagaatcggcgctcttaaattccaaagttccgcacgcggcgtccgttttccatcgttaaaaagcagcggggcgataaacaaaacaaaaaacaattcagtattcagttcaaaatgaagcccctgcggaaatgacgccgcaatgataccgagcgccacctgaatcagaggcaccgggataaaggggacaaaccgatttacgatatttgagatcgcgatgatggttaaaagtacgagtacgactaaaaatatgtccaaagcatgacctccttcatctgctgcatcatatattattgcctgttctctgcctttgccaaaggccggagccgatgatcgggcagattcaatatattttccgtacgcaaccattcttcttttattttacccgtttttatttaaaatttctcataacgtgctcacggcgaactttttttgccttcagctacattttttccggaaaaagaaaaagcctgttttctctgaaaacaggctttttcgcaagctgcgtcatctgtttcatgacgcggtgcagcgtttatgctgcttagtaaaggatagagaacgcaccgtcagtgtgtctctatccttggttttaagtgctcatcttattcgtgaaaattcatgccgtctgtcgtcgctttaatgatgcccgcgcggatgacgaaatcgccgaagtgttcgccttcctcacgctctttcgcgtagcgcgggagaatggtgcgaagctcactgagaatttcctcttcaccgatattttcccggtacattttgctcaaacggctgccgtcaaacgccgctcctaaatacatattatattttccgggcgcctttccgataaatccgatttcgccgagcgcatggcgggcgcagccattcgggcacccggtcatacggatggtgatttcttcatcccgcagcccgttttcgtcaacaatgtcttcaatcttatcaatcaatttcggcagatagcgctcggcttcggccatggcgagcccgcatgtcggaagcgcgacgcaagccattgaactgcggcggagggcggaatgctgccggccgtctgtcagaccgtattgttcgattaatgcgctgatttgtttctttttctggctcgagacattgcctataatcaggttttgattagaggtgagacggaaatctcccgtatggactttggcgatttcacgtaatcccgtcatcagcttataattctcatagtccgtgacgcggccgccttcgataaacatcgtaaagtgccatttaccttttacacccttcacccatccgtaacggtcgccgttatggtcaaaatgataaggtttcgcttcatccagctgccagccgaggcggttttccagctcggcttttacgttttccagcccgagacggtcaacagtgtacttgaatctggcattctttctgacggaacggtttccgtaatcgcgctgaatcgtaatggttttttccgctacatcatacagctgctccggtttgcagaagccgatgacttttgaaagctgcggataagtggccgtatcgccgtgcgtcattcccataccgccgccgattgccacgttgaatccgataagacggccttcctccacgatggcaatgaagccgagatcttgagaaaagacatcgatatcattggacggaggcacggcgattccgattttgaatttccgcggcaggtacagcggcccgtacatcggttccgtttccctgtcaggagtgcccgccacacgttcctcatcaagccagatttcatgataggctctcgtgcgcggaagaaggtcatcgctcaatttcttcgaccattcgtatacttccgcatgaatttcagactggtgcggatttgaagcgcacatgacgtttcggttgacatctccgcaggccgcaatggtatcaagcagcgccgcattgattttctgaatcgtttttttcatgttccattttaaaattccgtgcatttggaacgtttcacgcgttgtcagcttcaatgtattgtttccgtatttttgcgccagttcatccatgacaagccattgttccggagttgaaacgccgcctggcatccggacgcgcagcatgaactgataagccggttcaagcttttgtttttgacgttcattacgaagatcgcggtcatcctgcaagtagcttccgtgatgcttcatcagccggttgtcatcgtccgggatgccggctgaaatccggtcgagcatgacttctttcaatgtgccgcgcaaataatcgcttttttctttaatttcctcaacatcacttggagggccttccggcgcttttaaaatgttgttcaccatgctgaataagctcctttcaaaccaaaatcaatatacgtcacgctgatagcgttttttctgctgcatgtctgccaggaagctttccgctttttcacggctcatgccgccttcttcctgaatgatatcgagaagcgcctggtgcacgtcatgcgccatatgctgttcatcaccgcagatgtatacggcggctccctgctgcagccattcataaagctctttgctttgttctttcatgcggtgctgcacatatactttttcctccgaatcccgggaaaaagcgacgtccatttttgtgagaacaccgttttgcagccatttttgccattccgtctggtacagaaaatcagtgacaaagtgctgatccccgaaaaacagccatgttttcccttcagctccggtttcttcacgctcctgcataaaggaacggaacggcgcgatgcctgtccccggcccgaccataatgatcggtgtatccgggttttccggcagcttgaagttttggttgtgctgaatgtaaatcggaagcgtatctcccggctggagtctttccgcacacagaatgctgcagacgccttttcgttctctgccgtgcgcgtcatatctgaccgctccgattgtcagatgcacctcttccggattcgcttctaaactgcttgcgatcgaatagagccgggccggcattttacgcaggatggaaagaaagtcttccgctgtcgcttcccacggaccgaaatcccggacgagatcaagcagatcacggccgttgatgtacgctttcagctgctcttcgtttccttcggccagaagttcactcagcttttggtcagccgtaaactgtgcggccttttgcaggaacggttttgttaaaacggttatttcaaaatgagaagtaagcgcatctttcagcgggaggcgctctccttgtttattcaccgccacttcctgttttgggtcccatttcagctcattgatcagctcatcaacgagcgccggatcattttccggatagatgccgaggctgtctccgggctgatacgcgaggcccgatccttcaagcgaaagctcgagatggcgtgtttctttattcgaaccgcgtccgttcagattgatgttctcaagaacctccgcccgaaacgggttcgttctggaataaacggattcaccgagagccggcgtctcggcaggcgcttcggctgtttgatttcccgctccttcgttcaaaccgccgatgaccgcgtcaagccattcagaaaacggctcatcataatcaagatcgcaatcaacccgcggcgcaagctgtgtgccgccgagctcttgaagacgctcgtcaaactctttgccggtctggcagaaaaattcatacgagctgtccccgagcgccaaaacggagtaacggagcgcttcaagcttcggcgcgcgtctgccgtgaagaaattcatgaaaggccagcgcgttatccggcggatcgccttctccgtgcgtgctcaccacgatcagtaaattgtttacttttttcagattattcggcttaaaatcgttcattgacgcgacggtgacctggaatccccgttcctcaagcgtctttaccgtctgtttcgcaagaccttccgcatttcccgtttgcgatccgtataatacggtcacttctcttgagactgccgggctttctgcaggaaccggagcagcgggtgcggctgtttcaccggattcggaccgggccgcagccaaataaccgctcagccagattttctgtgattctgtcaaggtcggcagaaggcggttaaggagctctgcctgctcctgattaaacggactgttcatgacctgaagttgcaacgatatccacctcacaaggaattaaacgtaacgtacgttatttctataggaattgtcaaaataatattctaattgaaactttaccgaaagtttgtatgtaagtaaaatatataatcatgatgacaatgattaagattactaatgataaaaagccctttgcacttggcaaagggcttacacgaataagccggcgggcacttcttttataaaaggagagggttctcccggagacagcacggtcagatgatgcatcgcgcgcgtacaggccgtatataacagcttacggtcatgttcgcttttgtactgggcagcagaggcatcagcggcaatgacggcgtcaaactcaatgccttttgccaaataaacgggaatgacgcatacccctttttgaaaaggctggttttctttattgatcaagcggacaccgctctcggcgctgactgtctgaaacacttttttggcttccgcggccgttttgcagatgacggcgaccgtctcccagcctttttgtctgagctcccggattgtatccgccaattgttcctgccgcgctttttctgtatccgtccgcaaaacacgcggtttttccccgttccggttaaaaggttcaatgtcatcgccgtcagccagcagcgctttcgtaaattcaacaatctgccgcgtcgatctgtaagtccgcttcaggctgacatacttttctgcaccattgcgaaagcagccggcgagggaagaagggcccgtaatggtgtgggcataaatcgactggctgacatcaccgagcaccgtcatctttgccgccgggaagatgctttgtatatacgtcagctgaaatggggaataatcctgcgcttcatcaatgaagacgtgcttcatttgtgtgttttttctttttccttctaacagatcctgcaaatacagatacggagcggcatcttcatacggaagtgaccgttctgcaaatgcgtttctggtcaaagcgccgatgctctcccaatgatcgggcttttcatcagctccccagtctgaaaacagccggagatacatccgttttatatcgagaaagccgagccgtctgacggcctgcttaatcggtttaaaggctttgcctacaataatggcgccaagcagccgctgttcgcgctgatggtcgtcaaatgcaggttcatcatctgccgcctgcttcttgagtgtttgataaaccacagcatagtcttccttatcaagcagctcgctctcctgcaagacccattccttcttacgctcctttttttcgagagcgctgatttccgcgagaagccattccgctgtcagctccgctctgttcggaatcggcagctgctgatcaagcgaataaaaatagtcttcaatccgttcttttgaaatcaggatgtctccccggaagctgatctgtttacacatcagacccgagccggaaagcgagccggcgtagcggtcaatcatggactggaaagctgatgacgctttgtaagcaatggctgcaagccttacagaaagtgcgtcctggttttgttcagtcaggcaatattcaagctgctcgtacgggctttcacaatcaaactttcgtccgagccggcggatgatatattcctgaaaggtggcctgctccatattctcttctcccaattccggcaatacggcggaaacataactgttgaacaaaatgttcggggaaaacaatacaatctgacgggcatcaagcaccccgcgaccgcggtacagcaagtaagcggcccgctgaagcgccgcggatgttttcccgcttccggcggctccctgaacgatgagatatttgcttttttcatcccggatgatttcgttctgttctttttggatggttgacacgatgtttttcatatgctgtccggaatggccgctcagcacctcttgcagcatttcgtcaccaatcgtcatatccgtgttaaacatcgctttaagcgtcccgtttttaatgataaactgccgcttcagtgtgatgtctccttctatcgtttcttcgggaacttcatagcgggcttttcccggggaatattgatagtaaagagatgagatgggcgcgcgccaatcataaatgagaaattgctcgttgttttcatccatcaaagaagtcagcccgatataaatccgctcggaagaggactcccctttttccgtaaaatcgacacggccgaagtaaggagaggttttcagcttttggattttttgaagctgccggtattgaagccgatgcgtccgttcacgttctgaaagcatttccgcctgctgtttaatgcttgaaaatgtctcagccgcttcatgggcgtcatccatattcacggtgacatcatcccaaaacgtttttctcagcccgacaatatcctgcttcaatccgcccgatgaggcttcaagatgagtttgtttctgttccagttccttcatgacaaaattgattctttcctgctcttctttccactctttatcacgttttgccatcagcggcacctccgacatcaagctgacaaatccggctttcatcatacaaacatatatgcaacatattattcagcattatggtcaaataccctttttcttatcatatcgggcgtctttttttatcagaagccgttatgcaaaaaaaaccgatttcgtttgtgaaatcggtttttttactgatctatatgataggaacgattcggcaggcgccacctgaacacataactgcagatgcggcatgccacaagcacaagaaacagcacatacaaaccggcggcatccccggcccagccgaggcccacgattaaccctccgagcgcggcccagaccgcgtaaatttccgccttgagcacaagcggcttcctgcccgcgagcaaatcccgtatgatgccgcccccgctgccggtgaggaccgctgccgcaatcaccgcactgagcggatggcccattttcacggcatataaagcgccttggatggcaaacgccgaaagcccgatggcatcggataggttgccccatttactccaatgccttaacagcagcttcggaaacaaaaagacaatcgtaactgatgcgagagcgatttgaaaaaacgcgccttgctcccacaaggcggagaccggaacaccgatcagcagatttcggatcgctcctccgccgaacgccgttacaatccccaagatatacacgcctaaaatatcatactcctcttccatcgcaacaatcgctccgctgaccgcaaacgcaatgatgccgattacactaagcagctcccaggccattccatatgctcctttttatttgttaaattttctgacgaccattagattttataatcgctttctcttaaaatcaaccttatttttgaaagattctgattcctaatccgggacaacctcactcgcaacggctgggagcaagaacatttacctattttatactattttgggaggtttattggaagtttcattgaatactttctctaacaaaaagggggttatgagatgaaaatcagttcacttgtttttcctgttttattggccgccggattcattcccggcctgccgtcagccgaaagccatacgcattcgcacactcatgcggagccggcgaaaacggtgtatacggacccgcttccgaaagccgatcattttaaagatctgaagggcccggtccaagtcgaacagacggttgacacaaaaattctggatgaaaacggcaagcaggtcggcacgaaacgattcaatgccaatgtcagtcaggataaagcctcaactaaagccagcacgggcagccagaaggtcaaagtgctggcggtggcggacgctgaataccgcgccaaatacagcgactggcaaacgcgaatcgtccagatcgtggagcaggcggatgttgcttttaaccgtgatcacaacattgatttcgtcgtacaggccgtgcaggcttggaattcctccggctcaaacagttctcagattttatcgaatctccaaggcagcttcagaaatcaaaattatcattttgtcgtcggttttaccgcaaaatcaagttttgacgccggcgggatcgcgtatgtatataacggcaaaccgaacggcccggctttcagcgtgaaccttgatcaaggaacggccaacacggcgaaagcggcacagcacgagttttcccataacttcggacttcagcatgacgcccaaggcagcggcattcgctgcgtcatgaattatgattatgcctattccgtggatatttgggacagctcccataacagacagattgagacaaacaaagcttggtacaaataatagaaaaagagccgctcccatggagcaggctctttattttgccgcgcgttccgttttgacaaaacacatgcagataataatgagaataaatgccgtcaatgccaggaaaggaatggtaatgaaaccgaaccagttaatatattcagatgaacaaggcacgccgtagacacacggcttgatgccgctgaaaccgggcaccttctgctcaaggtaatgcatgatcgatataaacgcgccgatgacggccatcggcagcacgtatttttttacgcgcgtgtcaccctggaaggtggcgattcctaaaatcaggacaagcgggtacatgagaattctttgataccagcacagctcgcacggtatgaattttctgatctcgctgaaatataggctgccgagcatggcagcaagagctatcacccaagaagcatataaaaatacgattctatttttcatttttcagctctttcttaatcgtttttgaaatctcctcataatcagagaattttttaatcactttgtcatttacgtaaatcgtcggtgtcgccgttatgtttaatttatcattcaggtcagtgtcagctttcagctcttttgcaaatgtctctttatcaaggttttccttcagcttgtcaggatcaacctttttcgcggtgcttttgaccgttttttcaagcaatgcaggcgtgacccattcctgttcgcttgacggctgctggtcaaacagcttttcatggaatgcccagaatgatgccgggtcttccttccacacctcttctgaagcaagagccgccagacgcgagccgcttccgtggtacatgacgttcacaaatgaaaatttcacgtcgcctttatcgataaaatcttttttgattttcggaaagatatcgctgttaaatactttgcatgacggacacttgtaatctccgaattcaactaccgtaacaggcgcgctgtctttgccgagcacgggctgtcctttaatggaaggctgttcggcgactgtttcgcccgctttttccgtttggttgttaataattacgatggccgcaaataaaacgacaacgattaacgtcagtatcaccgcaaatttcgcagacgattgtttctttttcactcagacacctcattgtttttaaaataaaaaagaagcggatgccggatggcccgcttctctattttaccaagacaaccttgtttaagaaaaccctgaaaaacgaattatctttgacaattattccgctttcactctcatgacgcgcatcgcattggcaacagcgatcagcgtgacgccgacatctgaaaagaccgcttcccacatggtggcgaatcccaatgcaccaagcaggagaaaaatcatttttacgcctaaagcaaatccgatgttctgccagacgatccggcgtgtgcggcgtgcaatccggatggcttcggctgcttttgacggctggtctgtcatcaggacgacatcggccgcttcgacggcggcatcagagccgagagcccccatggcagctccgatgtcagctctggcaagcacaggcgtatcattaatcccatcgccgacaaacatcagtttttcattcggtgcaagcgccgcttcaagttcttcgacgcggtctaccttgtcacccggcaaaagctctgtgtacacatcatcaataccgagctctcggccgacagcttctccggtctgctttgaatcacccgtcagcatcactgtccgcttcacgccgagcgcttttaaattggcaatggcctgtttggcgtcctctttgatttcatcggcgatcacgatcgcccccgcatactgctgatcaacggcgacatagacgacggttccgttgttttcagctgtgccggaagcgatttgttcttttgccatcagtttttgatttccggctaaaatcgttgatccgccggttttcacccgaatgccgtgtccgggtatttcttcatattcttcaatctcgtctgccgcgagcggttgattgtaagcttcacggatggaagaagcaatcggatgattggaatggacttccgcaagcgcggccgcatgaagcaggctgtcttttgtaaatcccgccgccggtctgatatcagtaacggcgaaattccctttcgttaaggttcccgttttatcaaacacggcgtatgccacctgattgagcgcttctaaatagttgcttcctttcacgagcacccctgctttagacgcagctccgataccgccgaaaaacccgagcggaatggagacgacgagtgcgcacggacaagaaatcacaaggaaaatcagcgcgcggtacacccagtcggatagcgcggctgaaggcacgagaagcggcggtaaaaaggcgagaagcaccgcaacaatgacaacggccggtgtataatacttggcaaacttcgtaataaagttttccgttttcgctttgcgtccggccgcattttcgaccagatccaatatttttgacacggcagagtcttcatatcctttagaggtttcaatatgaagcacgccgttctgattcataaatccggccatcacatcttgccccggctccgcttttctcggcacggattcgcccgttaaagcggatgtatcaaccatcgaggaaccgctcagcacctttccgtccagcggaatccgttctccgggattcacgacgatgacctgtccgactttgacgtcctgcggcggaacggcagtcatgccgttttccgttttcacattggcgtactcaggacggatgtccaataacgcgctgatcgattttctggatcggctgacggccgctccctgaaacagttcaccgatttggtagaacagcatgaccgcgacgccttccggatactgatgaatcataaatgcgccgatcgtggcaagcgccatcagaaaatgctcatcaaatacctggccgcggacaatgttttttcccgctctggctacgatatcgccgccgataatcaaatatgatgcaaaaaagagcagaaactcaaggacggcgcccgtgtgcgcgaagtaagcgatgacggccaaaacggcgcccgctgccaatctcactaacatcagctgcagctttttgcggtattcatcctcgccgggtttgtcttcatgcttcgaacgaacggtcacatgaggatcaatggactttacttttttcgcgacttcgtctttcatccattgctcgtttttgccgccggctgagaccgtgatggtgcttgccgcaaaattgacagcacagccgtctatgccgtcaatggcttttacgccgttttctattttttttgcacagttgctgcaatcaagtccgtctaatacaaattcacctttggctgctttcattttcgactcaccctactttccgtaataggattcccataacatcaatacagctaaacgaatttatatatatgaacatatactcatatatgtgttttctctattatatgcaggctttgaataaagtgtcaataaaaaagacaaaacaggcatcagcccattttgtcttttttcaccttctgtaaacgcaaagcattaaggacgaccgatactgagctgaacgccatggcagcgcctgccacccacggggccagaaagccggccgccgcaatcggaatgccgatgctgttgtatcccaatgcccagcctaaattctgcttgatgtttctcatggtcagcctgctcatgccgatggcgtcggcaatgccgttcaggtcaccgcggatcagcgtaatatccgccgcttccattgcgatatctgtgccggtgccgatggccattccgatatcagccacagccagcgccggagcatcattgatgccgtcaccgaccatcgccacgcgccggccttctttttgcagccgggaaatttccgccgccttttgttcgggaagcacttcggcgatcacgctgccgatgcccgcggcttttgcaatggcttccgcggtctttttgttgtcaccggtcatcatgatgacgtcaagccccatatcattcaggcgtttcaccgcggccggagatgtgtctttgattgtatcggcgactgcgataagccccgccgctttgccgtctgccgcaataagcatcaccgtttttccttccgcctccaagcgggccatgtgaggaagcagcgcctcatgttcgatgtgttccgattccatcagccgtcttgatccggctagaatcgttctgccgtcagcctcggcgtatattccggaaccgatccgggcttggaaccgggtgattttcgggatggcaatcccccgtttttcggctcctgacacgatggcttctccaagcgggtgctctgatcccgtttcggcggccgccgccagccgcaggagttcctcttcgttcattcccgctgccggtacggcgtctgtcagaaccggtctgccgtttgtcaccgttcctgttttatccagtacgatggtcgtcagacgctgtgttttttctaaatgctctccgcctttaaaaagaatgccgaattcagctgcgcggccggagcccgccataatgctcgtcggagtggcaagcccgagtgcgcacggacaggcaatgacaagcacggcgatgaatttgccgatcgcttcagaaaactgtcccggcgcggcccatacataccaaatgagaaaagtcagcatggccagccccagcacaatcgggacgaaaatgcctgaaatgtgatccgcgagccgctgaatgggggcttttgatccttgggcttcttccacgattttaataatgtgtgcaagcgcggtatctttcccgacattcaccgctctgattttgagaaagccgtttgcattgatggtcgccccggtgacggtgcttccgggagacttatcaacaggcatgctctcccccgtaatcatcgattcatcaattgcggaatggccttcaatcacttcgccatcgacaggaacacgttctcccggtttcacatatacgatatcccccgtccggacctcgtcaatcggaatcacctgtaccttcccttcccgctcaaccgccgccgtcttcgcctgaagcttcattaactttttaatcgcttctgatgagcggcctttcgctttcatctctaaaagctttccaagcaaaatcaaagtcagcaaaatggcgctcgtttcataataaagcccctctacatgtccgtctcgtccgagagacgcaatcgtcatgtacaggctgtatgcgtaagcggccgtcgttccgagcgcaacgagaacatccatattggcgcttttgtttctcagcgccttatacgctcccatataaaaaggccagccgatgacgagctgcaccggggtggcaagcgcgaattgcagccacggattcatcaggatatccggcatccagataaaagaagtaaaagaaaaatggctgaccatcgaccatagaagcggaaatgagagaacggcagaaaatatcagcctgatcagctgttttcgctgctctttctccttttgggataatctgccgtctccatcaaccgcttgcttctcgtctaatctgtagccgagttttgccacggtctctttcagttctttcggtgtcacctctttcggattgtattcaacggtgactgtttcaagggcgaaattcaccggcgcgcccacaacgccctctgttttgttcaggcgcttttcaatccgattggcgcaagcggcgcacgtcatgccttcaatctgaaactcggctttttccgtcacaacatggtagccgagtttttcaattttatcctttatggcgccagcttcgattttgtcaggctgataggaaatatttgaggtctcaagcgcaagattgacggaagcgtcattgacgccgtccatccgtttcagtcctttttcaattctagaagcgcaggcggcgcatgtcatgccccccacttgaatggtcatttctttcggttcactcaatgtcctcatctctcttcataaaccccatgggggtataagtatgataaaagaaaaccgcgcccgtttccgcagcgcgataaatcctatacgacgtcataaccttgatcttcaatcgcgtcttttatatctgatacggagactttgttctcatcaaacgtcacatccacctgtccggcttccaatttcacctgaaccgccgtcactccgttcagttctcctactccggtctctactgctttgacgcagtgctgacaggacatgccttcgacttgcagtgttttttgttccatgatgattccctccacgtcttgttttttcttcttcatgttaccatacccctgtagggtatttcaaaacattttattttacgattttgcgatttttttcacaacatcaagcagctcggcaatcgcctgctccccgtttccgctctcaatggcgccggctaagcagtgatgggcgtgatcttccagcagatgaaacgcgactttctgcatggccgcctgtacggctgaaatctgcacgagaatatccacgcagtatcgttcgttatccaccatattctgaatgcccctgacttggccttcaatccgtttcagccggttcaggatctggtctttttctttggcgcttttatgatttaacgattgatgctcggtatgtttgtccattttccacctcggtttttttctttgttatcttcattatacagacttgaaaatccggtgtaaaaaattttcaacacacaagttttaccagtacgcccgcggggtatataatgttatcacttatcaagagggggaaactcattgaaaacgatacaagtcggcatattgggatatggtttgtcgggtaaagtctttcatgcgccgcttttggacgtccttgatgattatcagatcaaaaaagtcatgacctccagaacggaggaggtcaaacgtgatctgccgggagttgaagccgtacgcgcgattgaagacattaccggtgatcctgacattgatctcgtcatcgtcacgacaccgagcggaatgcattatgaatcagcgatgaaatgtctcctggcgggaaaacacaccgtcgtggaaaaaccgatgacggcgacttcagcagaagcggaggaactgagaagaacggctgaagataaaggcgtcttactgagcgtgtaccacaaccggcgctgggacaatgattttttaacgatacaaaagctgattcgggacggggcgcttcaagacattcatacatatcaagtcaactacgatctgtacaatccggttgtccaagaaagatggcgcgaaaaaagcggacccgccacgggaacgctgtatgatctcggttcacatattattgaccagacactcctgcttttcggaatgccggaatccgtcacggcaaatgtgatgaaacagcgggacaacagtgaaaccgtcgattattttctggccgcgctccattacggcaaacttcaggtcattcttcaatccggctccatgaatgcggcaagcggcccgcgctaccagattcacggacggaatgcaagctttatcaaatacggaaaggacggacaggaagctgcgctttcagccggccaaaagccgattgacgacagctggggcgccgatgaccctgacaacttcggagagctgacaatcgcagcggatgaaaaacggcatacagaaacaatcccctctgagaacggctcttaccttacgtactacaaactgctggcagacagcatcttaaacggaaaaccgcttcccgttacggcaaaagaaggcatcgatgtcatccgtgtcattgaagcggcgatgaaaagcagcgaacaaaaacggacgattgccctttaatatgaaaaacctcccagccgtacggcagggaggtttttttaagatcagaatgattttccggcttctttcgcgcgggcaatcgcatcttctttaatttgctgtgctttattcggttcagcattatggccttcaacgattaatccgtcaaaagaaggaacgccgaagaagttcatcatgatgccgatgtaacggtggcccatttccatgtcagccgccggcccttcagagtaatagcctccgcgcgcctgaatgtggagcgcttttttgtctgtcaacagaccgatcgggccttgctctgtatatttgaatgattttccggctacagccacagaatcaagatacgctttcataacaggcgggaatgagaagttccaaagcggtgtgacgaatacgtatttgtcagctgacgcgaattgatcgctcagctcgttcagacggctgactttcgctttttcgttttcagaaagctcttcaaaacctgtgccggattgaagttttccccagccgctgaatacatccgcgtcgatatgaggaatgttttctttgtaaaggtcgatatgtacaacctcatcattcgggtttgattctttataagaatcgataaacgcttttcctgtcgccatgctgtaagatgtcttttcatcatgaggatgagcagtgatataaagtacttttgccattgtaaacagccctttcgttttcaaattacacacacatttattatgaaatatgaatgtctttttatactgatcagttctgtaataattatagttacaaaaaaatcttttcgcaacaataatatctcgaaatcagtatatttttttgaaaaggctgtaagaagtacctccagcaaatcgaaaaaactcgcgttaagcaaatttcgacaaagaaaagaccgattttgaccatgttaagcctaaatcggctgtttcatttcagacagttgtgtggaatttatccatgcaaaatgttcctgctcttatattagagacaaacgaattccgcttcatacgttcgaatttatcacactcttttattgcaggtctgcttgccagtttaacaaacgcttcattttctgttctgtttcaccttcttggcgaggttggtaaatggttaattttagttcaggggcatcgtacacttgaagagtaatatgatccataatcatttctccaactaaaggatgcagcagtgtttttttgccgcaaggagtacctagaacttcatgcttggaccaccaattacgaaactcagggctcttattggtaagttctttaatgatatctttaaaccactcatcaccgacaaaacgtgtataggctaaacgaaattgagcaatcaagcgttgcgcatgatcttcccaattaagaaagaggtctcggtattctttagacgtaaagcaacgccagactgcattacgatctcgatcattcattttattaaagtcaccaaaaaccacggcagcagctttattccagcttactatgttcaatttttcgtcggttacatatgtagggcagtattctaattgactcaatacatttttcaggacgctatttacactttcaacgagaggtcttcccgccttagatagcaatggccgatttgctaataaaaatagatgctctttttcctcttcatttaacctgaatacacgcgaaatagcctccaatacgtctgaagatacctgtatatcacgcccttgctctaaccatgtataccaggttactcctattcctgccagctgagctgcttcttctcggcgcagtccttctgtttttctgcgcggaccaataggtaaaccaaagtcttgaggagataatcgcgcccgtcgtgtttttaagaaatcccctagttctttccttctttctttgtcacttaacatgaacttctccccttataagtagtagttttaataataggataaacacactcctattcccattataaaccttcatctattctaataaatgaaggaggtgagttttatggttttcaaaaatagggctgagcctttcccaaaaggattagttctcctcatggctgcagcatgtggttttacagtagctaatgtctatttaaatcaaacgctcttagtcagtatggcaaatacttttcacgtttctgaaaactatataggaattgtagcaactttaactcaagtgggatatgcattgggaaatcttttattggtaccattaggtgacatttttgaacggagaaaattgatcctaagtttattatctattgtatgtataattttagccgcaactgctttatcaatgaatgtaacgtggctgattgcagcaaacttaattcttggatttgttaccatagtccctcaaattattgttcctcttgctgctaatttagcttcagaagagaacagaggaaaagtgttagggaatgttgccattggcttagtgtgtgggattttaggcgctcgatttatcagtggttttgcagattcccattttggatggagatcaatgtattgggcttcttttgctggcacaatgataatgatcattttaatggcaatgtatcttccaaaaagcaaaggaaatcatgcaatgcagtataaaacattacttgcatctttaggcccgttatttaaaaaagaaaaagtgttgcaaaaagcttgcctgagtcaaggaatgatgtttggttcctttagtgccttctggacaactcttatttttttattaaatacttctccgtattcttatgggagcaccgcggcaggtttaataggtttagtgggaatagctggagcctttgcaactcccatgattggccgggtgatcgataaaaaaggatcaaaatttgctaataccttatgtatgtttatttctttaatcgcttttctgaccttaatattcttaggatattggttaccgggattacttcttggcgcactattagtaacagttggcacgcaagcaaatcaagttgcttgtcaagctgctatctttcaactatctcctgaaaagagaagcagattaaatggtttatacatggtatctacattcttaggcggatctttaggatcatatctaggtgtacttgcttggagcaaatggcattggtatggagtatgtacagttgggatactcatgataggtattgcttttagttccttatttagcttacctaaaaaaagaacagtaaaaaatagagaattcgagaaaggaagtcatatctaatgtctgaaaatacagaaaactacaaaaagggattggaagttctatcaaaaatagatccgcacaactatcaaaatatcgtgaacagttttaaagattcagcagcacccgacttgggaactttggctgtggaatttaattacggtcaaattttttccagaccgggattagatttaaaatcccgccttcttgcagcagttgctggtctgactgctttaggaaatacggaacaattaaaattttatattaacggagctttaaatgtcggatggaccgaagaagaaattgtggaagctatgatgcaaatgttaatttatgcaggctttcctgtcgcattaaataccattttaacaatagctactgaagtattttctaaaagacgaaatcagctgtcagccaatttattggaaggagagtaaaaaatgattattgatagtcatgcccacgtagttctacctgtagaaaaacacattgaaatgatggattcaagcgggatagataaaactattttattctctacgcttgttcatccagaaaaaagtgaaagctacgatgaatttattcaggaaatggatgtactgaatcaaattttaaataacgaaataaatcccctagaagcacgatcaaaagctttagaagaattgagggatgctatcgcaaaatatcctgaccgttttattggatttggatcagttccccttttaagttcctccggagaactgcatgattgggttgagaagattgtaaaagattataaaatgaaggggcttggagaattcaccctgggttcaggccaaattaaaatgcttgagcctgtattccaggcagctagtgattataattcctttccgatttgggtgcatacattccatccactcaatttaaatgatattcgggaattgttcgctttaactcgtaaatatcccactgtccctgtaatctatggccatttgggagggattcattggcagcaagttattgcattaacaaaagaaacaaagaacgcctacctggatatttctgcattttatacaacctatgcattatctttggctataaaagaactcccggagaaaactttatttagttctgattttccatatggtgatccattcctaaataagttggcagttgaacgccatgcttcaagtgaagaagtcgcacaacgagtactaggcggaaatattgctaacctcttaaagatttaacttatttttataacaatttcttagggaatataagtttgaaggattgcattcaacaggttttcattccttacgtcttttaatagtaaagagccgatttactcttaatggttaacggggtaaatcggctcttttcttatccaaaatgctggcgggatccctttaatgacgggaatggcaagcagcagaaaaagcagaaacatttagtttctgctcaaaatcggatttgatttacagatcggaatatccaatccgagattcccccgcagtgtatcggccggatagctttttcggtacagccccttttcctggaggatcggtatgacttgatccacaaaggcttcaagcatgccggggatgtcagagtgaataataaacccgtccgccgcttcccgctgaaaccatgtttcaattaatgatgccacacgttccggtgtaccgataaaatgggttcgcggaaacgcggcttcgcgcgccacttgacgcagcgtaagattccgggctttcgcctcccttttgatacggtctgtcgtgctttgaaacgcgtttttcccgacgtcgcccaaatcaggaaacgactcatccagcggaaaacggctcagatcataatcatcaaaaaatctggccacatatttaacagcgttctctatcggaatcagctcggcgaattcttggtatttcgcttccgcttcttcttgtgagccggctataatcggactgattcccggaaagatccgcagcttggtagcgtcccggccgtaatccgccgcccgcttcttcacatcatcataaaaagccttcgtttcctcaagtgaattggagtgcgtaaagactgcatctgcattcctcgcggcaaacgaccgaccggtttctgaagaccccgcttggaaaacgaccggctctccctgtttggaccggccgatattcagcgggccctccactttgaaatactcgcctttgtgatacaggcgatgcagtttgtcagggtcaaaaaactgcccggtttctttgttgcggacgaaggcatcttcttcccaggaattccacagaccgcgcaccacgtccacatgttcctgggcgatggcatagcgccggctgtggtcgggaaggctttctttgctgtgattgcgcgcggctcccgcctgcggagaggtgacgagattccagcccgcccggccgccgctgatatggtcaagagacatcagctgtcttgcgatggtgaacggctcagtgaacgatgtggaaaatgtgccgattaaaccaagatgggttgtagaggcggcaagcgccgataagatagtgatcggctcaaaccgatttaagaaatgcgggatggacttttcagaaatgaacaagccgtccgcaataaaagcaaagctgaacagccctctttctgcagtctgcgctttttgcctgtaaaacgccgcattcgtgcttgctgtcggatcggcgtcgggatgacgccagccgtccgttgtgccgccgacaccgtgaatcatggctccgaattgaataagatccgtccggctcattttctctccccctttttcccctcgtaatcggcaagcgcccgttctacatgttcaatgccgacttgagtaacggcctgatacacacggctgtcaccgctgccgagttcaacgacgggaacatgacggatgccgtatttcatctgcagcacgtcacgcaattcgtcccgttctgtcacatcaattgtttcgtacgcaatggccttttcccgcaaatatcctttcacttcatcgcaatacgcacagccctgtttgctccagaccacaacgtttacttcatgactcatgttcatccctcctgtaattgtggggccggctgcaccgcttcgcttaacagccggtaagacaatcgtttttcctcagcgtttttgataggcgacaaaatcacaaaatcagtaatgctgtactgaacggataatcgtcgcagctcggcggcagtctcttcttttgtcccggcaattacacccgtcttttgtgtaatcagcttatatggctgcgtgacttgttcaagaaacgcttccgcttgttcccgggaaccgacattcacctttttgccgtcttcgagaatgattttgaccgactcacgcgatacgacgtgtttttccgcttctgcttttgtatgcgcggtaaagaccatcggcgcaaggtgaaattccgccttcgatcctttcggcagatgctcgtcaaaggcgtggcgcgctttttctaacgcagcctcttcaccgtttatgaaataggcgaaaacgaaggaaatgccgagtttggccgcggatatcgcgctttccgcgctgccgccgagcaaaaagaggtcaggcgcatactcagtatgcggcgccggccgcaatgacgcatagcggtgtgagtccggaaaatcatttcggatgaaatgagtcagctcctcaagcttttcttcaaataaacgggcgggctggataagctcccgctgcagcgcatcggttgacagctgaaatccgccgggcgctttgccgacaccaagcgccacacggccgggagcaagagcggacaaaacccggaactgctccgccactttataaggactgtaatgctgcagcatcaccccgccggatgcgagacggatttttttcgtgcttgcggcaagataccccagaacaatttccggcgctgatcccgctatctcttcattgttatgatgctccgccgcccagaaacggtcatatccgtattgttcggcctcctgagccaatttcaccgtttgccgcaaggcttcttctgcggtttggttttccgcggtgacactttggtctaaaatgcttaaacgaatcatacgacaggctcctttatgcgctcttttatgtcataaccgtaatcaggcagcacgcggcggaggaacttcttcgttctttcttttttcgtcttgtaaaagacttcctcaggcgttccttgttccacgattgctccttcatccataaacacaattcggtcggacactcttctggcgaattccatttcatgagtgacaatgatcatggtggcgccggtccgcacaatgttaagcatcacctcgagcacctcgccgacaagctccggatcgagggctgcggtcggttcatcaaacagcatcacatcaggatgaatggcaagcgcccgggcaattccgacccgctgcttttgtcctcccgacagctgattcggataggcgtgcaatttatcctgaagccccaccttggccagttcccgctcggcaatggcgtacgcatctgtttttttcattttccttgcgatcgtcaggccttccataacattttgaatcgccgttttatgcgaaaacaaatgatattgctgaaaaaccatcgccgtctgtttcctcagtctgagaatgtcttttttggtaggctttttgcagttaatgacttcaccgtgcagcgaaatggcgccttcatccggccgctcaagtaaattaaggcagcgcagaaaagtggttttcccggaaccgctcgggccgatgatggtcacgacttctcctttccggacacttaaattgatgccctttagcacgtgatgactgccaaaatgtttctgaatgtttcggatttcgatcataatgcgcctccttgatatctggctgcccttttttccgccagactgtttacagcttcgagaatcagcgttaatccccaataaatcacggcagccccgataaatgcttccagaaatgcatagttatcggatgccgcaatcgtcgccgttcctgtaatttcaggcaccgcaacaattgccgcgatggaagtggtatgcaaaaagccgatgcctatattggtgaagttcggcagcgatatcatgaacgcctgcggcagaaccacgcgccgaatcatctggccccgcgtcaggccgattgaatatgccgcctccgcctgccccgtatcgacggccatgatcccggaacggagaatttccgtcatataagcgcctgccgttaatgacagtgccatgatgacaaacacggcgaccggaatctgattggccgaccagccgagatgaaacgcgcggctgaattgatcggcaatcagcggaacccctaaataaatcagcataatatggagaatcgccggggtgctgcggaaaaaagacacgtaaaacgatgagcaggccagcagccatttgatgcggaatatacgcaccgtgatattgccgagagctatgaaaaatccggcaataatcggaatgaccgtcatcgccaatgtaagcggaacggttttcatcatttgttttatcgcagtgccgataaatggaatgtccagctccactgttctccctccttttcagccgtgcgagctcatgtcaaaaaccgtcacaaggcgcgtctcatctttcttgattcgtttttcggcccatctgaagacacattcaaataaaagggcggccgcataatacagaacagaaagcgagatatacacttctaaagaatgattgctcgatgtaatcaaggtctgtcctctgcccgacatatccatcaccccgatcgaaaaagcgagtgatgtatcttttaagaaaccgatcaccatatttccgatgttgggaaaggcctgcacaagcgcctgcggcagaatgatgcgccggaatgtctgccccccgttcagcccgatgctgaaagccgcctccgcctgcccgcggtcgacgctgttcacacctcccctcatgatttcggccgctcttgccgcgctgctcagcgcatacgtggcgatggccgcatacaaagggtccattttagaggtatcgattccggcgagcgccgtgagcgccggaatgccgtaaaatacaatgaacagctgcaccatgatgggcgttcctctgaaaaaagagatatacagcttcgcaaactgattcaaaacgggaatgcgatagatgcggggcagcgccaaaagcagccccaatagaaagccgaacagcagagacaccgccaatatatacagcgtgacgggcaaatacccgagcaatgtcggcacaaaggacgcgatcatactgatatcaaacgctttttccattgccgatccctctctttttcacttaatattgctcctttgaataatccgcgccgagccacttttcactcagctttttaagcgtgccgtcatcaatgatttccttgagggctttatcaatgtcatcgctcagcgtttgttcatttttgttaaacataaagaacactttggcatttgacagcaccccgccgaccgttttttctttaatcgcgctcgttttgttttggaaatcgacggcaaacggcgtagaaatcgtcgcatcggcgcggccggatttcagctgattggccgcatcgtttgaaccttggcccgcataagcgatttcaaacggactgccgtgtttttcattccattttttcagcacaagcgcgccgtttgacgtcggacttgtaatgacccgctttcctttcaagtcatcaatgccgtgaatgttcccgttttcttgaagcaccgtgattttcagcgggaagttgttatacgcgacttgattgaacagaaattttttctcccgttcggcgcttttctccatttgatgggctacgatatcgactttatgctggccgaggctgacaagcaggttggagaaatccatcgttttaaaagtgaaacgatagtccggcaggcgcctgtcaagctctttcaccagctcaacgtcgtatcccgtcaatttgcctttatcatcaataaagcaaatattcggaaattgagttcccgtgccgaccgtgatgttcttcacgtttttctgattgcctgatgccgcctccccgcccgcgccgcaggctgataacgccgccgttgcggcaattgttaatgacatgaccgccaatcttattttcatgtgatcgccccgttttctgcctcaattatttcgtgaaacttgattttgaataatccgcgccgagccatttttcactcagtcttttcaatgtgccgtccttctcaagcttttgaatcgcccgatccgtatcgtccgccagggtttggctgtttttattgaacataaaatacacctcggtatccagcagcacatcaccgaccgttttttgtttgaacgcgtgcgtcttattttgaaaatcgacggcaaacggcgtggatacggtggcgtcagcgcgtcctgtctctatttggtttgctgtatcattgccgccctgcccggcgtatttcaaatgtatcgggctgccgtgggttttgttgtatgccgtcatataatccgccgcgtttgacgtcgcgccgacgatgacggttttcccttttaaatcccggagcgtgtgtatcgcgtcattatccgccttcaccgtgaggtacatcggcgagtagttatatgggatcttgtgatacaaaaagcgtttctcccgttccttatttttcgccatattatgcgcgatcacatcaattttccggtttccgagacttgtaagcagattcgaaaaatccatcgtcttaaagacaaatttgtattgcggcagctgttcatcaatggctttcatcacttcaatgtcatagccggtcagctcgcctttttcatccataaaagcaatgttcggaaaatcagttcccgtgccgacaatgacggtctgcacgccgctttccgcttttgtgctttctccttgcccgcacccggccagcacgccgagcagcagaagcagacagccggctctgatccgtttttttatcattgcgcccagctcggtgtgcctaacagcgacgcgtcaaaccgctccggtatgagcacctttctcatcatgactccgatgtctccgtctttctcctgctcaaaatacacttcataccccctccgtctgtacatatctacaagccagggatgcttgcgcgccgaagtgccgagcgtgatggccggggccttcagcgtatcccgcagcacgtgttcctccacataagtcaaaagtttgctgccgatgccctgccccttcagctcaggaagcgttgcaaaccaccagacaaacggatattttgacggaggcgtgtcactctcccacggaaaacggatcgtaatggttgaaagaagccgtccgtcccgttcgagcacgacggctgaatgattttcaatattttctgttaccatatcgatgtcggctcgcgccgacggccagtcaatctccaaattgcggatcggctgaaacgcgctgtacagcagctctaaaaactccggcgcatcctttttctcagccaatcgaaatatgtcttcactcattccggtcactctccccgcaaaaatatataattcccatttgtttactaagctttgattgtttatactataaagcaaactgatttatttgactaatcaaaaaaagtaaaggaaaggttcaagaaaattaatgaacagccgggaggggatttcgttggaattacgcaccattaaaacgttccatacgatcgtacagtcaggcagcttttataaagccgccgaaattctgaactactcacagccgacgatttcaatgcggattaaacagctggaacaggatgtaggcgcgcagctgtttgaacggggaaagaagctgaagctgacaagggcggggcggctctttcatgagcgggccgggcagcttctcgcgcaatacgaggtgcttgaccatactctggccgacatcagacaggggcaggcaggccttattcagatcggcatatccgaaccgacggcaagcctgatcttccctgccgtactgcgggggtttttagatgattatcctgacatgtcggtcaatgtcagcgtggatgatgccaatacatgcagccgcaaactgctggagggcgccattgattttgccgtatgcggcgagccggagctgattctggagaattatttcgatccgttttttcatgactcgctcaatgtcatcgtgtcagacagacatccccttgccgccaaagcaagcgtcaatctcgaggatttagaaaatgaatgcctgatttttacgcccgccaattgcccgatccggattcaaattgaacagcacctgcagcggtccatcggcagccgctatcgaaaaatggagctgaccagcagcatggctcaccaatactatgtctgggaaaatatcggcgtctcaatctttacggcgacggcgcattcagaaccgatcgagggcacgaaggtcattccgatccataacttaacaatttcaccgccggtcgggctgttgacaaaccaaaaagaagagcattttgactccgccacaaaagatttaatcagcaggatcatcagccggtttcagcgtgatccgcattaaaaaaacccccgctttacgggggtttttgtacgttcatcttatataatgctccgcaccaagccgccgtcgatccgcaatgcagatccgttaatggcagacgacagcgggctgcttaaaaaggcgacaaagtgggcgatttcttccggacggatcaatcgctgaatgatcgacgtcggacgattttccttcataaatcgtctctccgcctcagccgctgtcaggttttcaccgggataaagcgactccagcatcgtttcgacgccctctgttttcgtggagcccggcatgaccgtattcaccgtcacattcgtcccttccgtgagctcggccagactgcgtgacagcgacagctgcgtcgttttcgtggcgctgtagtgggccatttcctgagaaggcatgacggccgcttcactcgcgataaaaatcacccgcccttccttccgttcaatcatccgctttgcataccgtcgtgtcagcctcacgccgctcatgatattcacctcgaaaaaccggagccactcctcgtcaggaatatcaaagtattccgcaggttcaaagattcctaaattgttgacgagaatatccacatccggatactgctgaaaaatcgccccgcatccttccgccgtgcctaaatcaaatgcggccggatagagacgggcatccggcgtctgtttctctagttcccggatcgtttcgttcaccttttcttcacggcggccgttaatgatcacggccgcaccttctgcaatcagcgaagccgcaatcgccttcccgatgcctgacgtagatcccgtcacaagcgccgtcttccctttcaactgcaaatccatcatccattcctccctatcgcaagtctcttcttatatatggactgaaatcgaaagcctgaaaccttccgtccctattatcggatagaaaaatggatgaggggaagtacgcactttttagtgcctgtccgttgtcccggctgaggctgatcgatttgaatgacaaaccgattccctaactcttcttgagcctcttgaaacagctccaagacatcatcagcatccgaaccgaatgccttttgactggcctcaaaattctcccacaccaaagtcagcggaagttcgatccagcctgtcagacaatcccataaggcattcagattttcaccataaaagtccgggaaatctaattgatcttttaagattcggtgtaaagcttctgtgcttgtaacatcttttccgtctatgatgacgatttccatttacattcactcctttttttcggcatgaaaaaaccgcagtgcggtcaagtgacggcactgcggttcctctgttatgtatggagacggtgggagtcgaacccacgtccagaaacatcgattacttaagcgtctacgagcgtagcctgcatatttcgtgtttcactcgtcttcgtgcctgcgggcgggccttccgagagctagtctgtcagtctcttcttacgttctcagacgggaacgcaagcgtagcctacttggatgtgctcttcacggacacataggcaatgtcaggaagagctcgctgcgtttattaggcagctagtgctaagttttggttaaaacttttagttttgccagttatatttaggtgcgtgttaacgagatcgcctctcggctcgcagctcaagctcgatccatccctgtcgaatccgtaacgtccccttgttaagggtatacgggagatctatcaagctcttgctcaactggctgtactgttattatatcatgatcacagacaaattcaattgggaatgtcttcaataaacagcctgtgaatttgatgtgtgaacagtatagcatacggcagttatcacatcaaggctcaggcatcagaagcctttttgtctgtctctgaacgctctttcgatttcccttttggcgtcttttcgttttaaatcttcgcgtttatcgtatgttttcttcccttttccgaggccgattaacactttggcaaagccgtttttcaagtacagcttcagcggcacgagagaataacctttctcttttgtcaggccgatcagcttattgatttctttcctgtgcatcaaaagctttctcgtccggagcgggtcgtggttatagcggtttccctgctcgtacgggctgatgtgcatgttgtggaggaacacttcgccgcgctcgattttcgcaaaggaatccttcatgtttacgcggccggcgcgaatggacttaatctccgtcccctgcagcacgatgcctgtttcataggtttcttctataaagtaatcatggtttgcttttttgttttgtgataatactttgcctgatccttttggcatgccttatcctcctctctccgcaaaaaccgttcatgtgtgcgatacgctttattttagcaaatggagcgttccgcgacaatgaaaatgcggcttgcgaaagaaagcaaacagagcattttgccccatttgcttttcgcatttacttcttctttttgcgtttttgttttggcgcgttttggaaaccgcgttttttctttttcttcttcggttttgtaaaccattcccctttttcctccgatttcggcggtgaagccggggtattgctgtttaacacacgtttccgcgccggtctgccgcgttttctgcggtcgcctgtcgtttctctcggacggcgggtgcctttcatgccgacaatttcaaagtcgatgtttctctcatctttattgacgtcgacgactttgaccgtgatttcgtctccgatccggtaaacgttgcccgtgcgttcgccgatcatggcgaaatgctgctcgtcaaatcggtaataatcatccgtcataaagctgacgtgcacaagcccttcaatcgtattcggcagctcgacaaacattccgaaattcgtgacggaactgatcatgccgtcaaattcctcgccgattttatcaagcatatattccgcttttttcagatcgtccgtttcccgctctgcatcaacggcgcgccgttccatcgttgacgtatggtcagcgatttccggaaggcgttcggcccacttttcttgagtcgcttcgtccgattgtccgttgatcaaatacgttctgatcagcctgtgaacgattaagtcaggatagcggcggatcggcgatgtgaagtgcgtataaaattcagtcgccagcccgaaatggcccaggctttgcgggtcgtatttcgcctgcttcatggaacggagcatgacggttgaaatcaccgtttcttccggacggtcccgcacttcgtcaagaatgctttgcagcgcgcgcggatgaatgtctccggctttccctttgacgatataaccgaatgtcgtgacgaactccaggaacttttgcagtttttcggcgttcggctcttcgtgaatccggtaaataaacggcacgttcatccaatggaagtgctcggccaccgtttcgtttgccactagcatgaattcttcaatcagcttttccgctactgagcgctctctgatgacgacgtctttaacggcgccttcctcatcgacgagcaccttcgcctctttgaaatcaaaatccacggcgcctcggtccatccgtttcgcccggagaatttcggccagacgttccatgtctttaaacatcgggacgagcggctcatatctttctttcagctcggcgtcgtcttctgtgaggatccggttgacatctgaataggtcattctttccgtcgttttaatgacgctttggaagatctcgtgctctgtcacctcgccctgctggttgattgtcatttcgcaggaaagcgtcagccggtcgaccttcggatttaaagaacagattccgttagacagtctgtgcggaatcatcggaatgacccggtcaaccaagtacacgcttgtccctctttccagcgcttctttgtcaatcggggaattctccgtgacgtaatggctgacgtcggcaatatgaacgccgagcttgtagctgccgttatcaagctttgtcacggtgacggcgtcatccagatccttcgcatccgcgccgtcaatggtgacaatgacctgatcacggagatcacggcggtctttgatgtctttttcatcgatggtatccggcgtgcttgttgcctgctccatcgcttcagccggaaaatctcccggcaggccgtgcttatggatgatggataaaatatcgatgcccggatcatttttatggccgagtatttcaacgatttctccttcggcgttcattctgccttcagggtagcttgtcagtttgacgacgactttatggccttccgcagcaccgttattggcatgtttcggaataaaaatatcactcgtgattttcttatcatccgggatgacaaaaccgaagcttttcgtttctgtgtatgtgcccacgacgcggtcgatgcttctttccaagatgcggatgaccgtgccttcctgtctcgatccgcttgactgggaattgagccgcaccatgacgatatcgccgttcatggccgtattcagctcattcggcggaataaacacgtcgcttaaagaggtatcctccggcaatagaaacgcgaatccctttgcatgcgcggaaatttttccttttactaaattcattttttccggaagcccgtagcggttgcttctggtgcggacgatctgtcccgtctcctcgagcgccaccagcgcttttaccagctctttgaattcatctgcttccgtgatgttcagcatctcctcaagttcctgaacggtaaggggcttgtacgcctcttccttcataaacgcgagaagacggtccataaacgcttctttttccattattcgacctcctgtttgttaccaatcgagtttctctaaaaattcgtacacatcctgatgaacgaggtcccgttctttatcgagcgtaatgacatggcctgattcttcataccatttcagctgtttgtcgtccgtttccacctcgttgtaaatgatgttcgcactttctgtattaatcatatggtcatgccgtgcctgaaccacaaatgtcggggaatagatcatgtcgacgtttttgcgcacatcggcaatcagctcctgaagcgatttgagcgtattcatcggtgttttttcaaactccttcatttccttttcaatctgctccggctgttttccttcgaattttttataattgcgcgcgtaggaaagaactccttcgtacataacctcttcacttttaatgtgcatcggcgcacacataggaacaattccctttatgggtacagtgtaacccaatttcaatgaaaaaaccccgccaagcgacagtccgcaggccgcaatgttttcatagccttcagaccgtaaatattcataaccgtccatgacgtctttccaccaatcttcaggccccgtatgtaccagttcttccggcggaacgccgtgccctttatattgaggcgcgtgacaagtgtagccgcgctcattcaagtagcggccgagcattctgacgtctgccgtatttcccgtaaatccgtgcagcagaagcaccgctttgtctccgcctttaaatgtaaatggttttggtgtcacaattttcatgctcataaccccttttttgcacattcaatttagttttccacagttttgcgagaaacaaacgccgtctctcaacaagaaaaaggcctgatattaaatcagaccttatacaaacattgccttatacgatatacgccagcgaaatcgtcaacacgaaaaacaagactgccagcacaacggttgtgcggtgaagaatcagatcaaggccccttgctttctgttttccgaaaagctgctccgccccgcctgaaattgcacccgataaaccggcgcttttgctggtttgaagcaatacgacaataataagtgcaatactgacgatgaccaataaggtaatcaataatgtgtgcatcccatacacctccagactgactggcctacattgcttctattttacatgaaaaacaaaggcatgtcacgccgtatcggtgcacatcatgtcagaaaaacggaaatgcgtttgaatcttccatcatcattgacttttgtcaacaaagtcgtagtaaaaaagatcttcaaatttcatgtcaaagtaatagagcatttttccgatgaccagctggcccggcctccgctctccattcagtacacggctcagtgtggcgggggatattccgatctccagggcgagctggtttaacgagtagtcattattgaccatatactgcagcacataatctcttctgatctgtatcttttcgaccactttcttcaccttccgttctgtcaaatactttcttatacataagatacggcttttgttaacttttgtcaatacttttccagcctggctattccctttagtcaataaacatactagaatataaatagaccgcgggagggggagagactgtggaaagcttcgggaaacaattgcggacattgcgggaaaaaaggcatctgacagtgaatcagctggcaacgtattcaggcgtgagcgccgcgggaatctcgcggattgaaaacggcaaacgcggggtgccgaaacctgcaaccattaaaaagctcgcagatgcgttaaaaatcccgtatgaggaactgatgcagacggcgggatacatagagaccgtccaggaaacgagagccccgtacgacacgggctgcaccttgctggaaaaagccgaaacgtatgagctgcatgatttatccctattggagcgggagaactggcggcacctgtcgaaagaagacttggttctgcttgataaatactttgcgttcttatcggctgaagccaaaaaaagaacaaatgaagactcatgactttgcacatgtgaggcgatcttattgaacacattcggaaagcaattaagagagctgcgccgcgcccggaagcttaccgtcaatcagcttgccgtctattccggcgtcagctcggcgaccatttccagaattgaaaacgggcaccgcggcattccaaaacccgcgaccatccgaaaattggcggacacattaaaaattccgtacgaggagttaatggcgcgggccggacacatcaaggcatttcaggaagaaatccgcgaaacctccgaaagctatcaatccatctgcgccatctatcagaccgccgttgacagaggcgcggagcatctgccgctgtttgacagcaaaaagtggcagcacttcacaaaagaagatattgaaagcgtcagcaaatactttgattttatcgcggctgaagcgaaaaagcgctccccggattcctcatcctctttttgatcctctcctcaacttaacaagcgccagacgtacgttccctccgattttgcggtataatagcagaagacgaggtgaaaaagcatgaaccaatcagaaatgtgccccagattcgaaaaagcggtcgacatcctaagtaaacgctgggtggctctaatcgtctttcagttattgaacggacagcagcgatttagcgaaattgaagcggcgcttccgaatttaagcggaagagtcttgtcagaacgtctgaaagaacttgaaacagaaggtgtcatcaaacgggatgttatccccgaaacgcctgtccgcattgagtattcattaacggaaaaaggctgcgcattagcccctattttagaggagatatctaaatgggcaacggaatggattgacccctttgactaattgataaaacggttctgtctcaaaagagagaaaagagccgttttttattttttccatatgaaaatacaatatctaagtcgaaggacccatagatcaccatctgaagaaggcacttataatatgcagcgcatcatttaaaagacagatgaaatcaatcagaacaaaatggttttaattgacggcatcaatgatatcacaatttgaccgagcacctgtcttctaaagaaaaggattttctgatttacacagacaaaagcaaaatgaggacacttaactaagagcaaacaaaccacctttaaggaagtgacgaacttacaaaccaatcgattactatcaatcaaaatatcgcttctctatatgaggaatccgttcccgaaatcaaagaaacaatttcgattagcgagtgatcatccaattcaatggttcaagtgctctagaatatcgaagaattttaacagattgtgaaggagcttaatgagaagatggatcagtttattatttaataaataacccatgccttccaatcaaagcatgggtttttatcacttctatcttataggtatgcttactcgcacttgtcctccaccatattggctattacctatcttaagttctccgttatgaaggtttactacattctttgcaaaagtaagccccattccataatgaccattagaatgacggctcttatcatccatgtaaaaaagatctgtcgctttctttaagccatcctgagaaaatccattccctgtgtctgtcaccacaaagagaaagtttgcatagtcacattctgcttgaaccgagacacccccaccctctggcgtatgatcaactgcgttcgtaagaatatttaataaagccctatgtaacaattgacagtctaccttcactttatgcattaggttttcttttttgaataagatgttaacttccttattccctttataggccgatatatcttcctgtaaagcattcgttaactcatcaattgaagctttctccaaattgatcgttagtgactcctccgtctttgaaaggtgaatcaactgatgaatatattgttcaatcctattccctgcaccgaggatatattttgtatattcagcttgttcttcattttgtattgataagctgagtaattcagcattccctttaataatggtcatcggaattttgatatcatgtgccaaagcgccaatttgctcttttttatttttttctaaacgccactgtgcctcgagtgaattttgaagagcatctttcatatccagtaaagaatcgattacacaatcaaactccttgatattcgtaaattcaggtttgaattgcaaatcctgttctttaatagatcgtgtgattatattgagtgtctcaaagtgtttttttaatccattggcaaagtatgttgtcacaataaaaataacggttataaacaaaatgactaatatacacatacttgttagctcatagttaggaaggtattttcttaataaaggcgaactgaaatctgcccgtaatgaatattgcaaaacacagtactcattttttctttctataaccaagtaccctttttgtttatagttaacatatggctttttttctatcttcttttttaccagatgcagatcctcttctttaacggtcccagccgtttctttttttgatttcttatcaagaatagcatacgacattgtatccggaatcatatccggggtcactttatcaacagttgcaagttttggcacaagtttttcagcttctcgttcattataattagctggataggaaaatccagtattcattgcaagtatattaataaataaataaagcacagcgaccacaaccaaactgatacatagcgtcgccatatactttataagttccttaaggagcgttttttttcctttgaaacctactcccatctgtaaccgacgccccatatcgttttaatgggatctgcattgtgctctttacatttcttgcgaatcgttctaataaattcagtaattgttgaatataaggcattcccctctattccgtatatctcctcgtaaatttgttctcttgaaaaaattcttcctttattttgtgctaagaattcacagattttatattcattttttgtaaggttaagtttgtgattattaataaaaacttctttactatcaaaatgaaacaaaaaacctgaaatgactcttttcgactgatgcttctctctatgctctcttcttaaatgggcattaactctggcactaagctccatgataccaaacggctttgtaatataatcatctccgcctgtaatgaggccgttcactattgcttcctcttcagtcttagccgttaggaataaaatcggacaatcaaccaacggccggatctgtttacaaagagcaaagccatctatattcggcatcataacatcaagcaaaattaaatcgtacccttgaaatatatcaagcggctggccttgtacactaattaatgtgtcaacctgatgctgatcacgacgtaaaatattctttatcaggacaagaatgtccttttcatcatcaacagcaaggatattcgccactccatggtccccctatactattcaaaagtttgtctgccttcccatctactaaaccatataagactgacagtgaataaacatattatactaaatatcacaattaatgcacctatatttatttcttggataaaaaaaggtttaagcttctcattgatttctttgaattgtaacatgccgtttagccctgacaatctaactccccaagcccaaggattatatttccatatgatatcacctaaacctgtattcataagtgaagtcattaacagaccagcccctcctataaggacagaagcccccgttccgaacatgaggctaataaaaaaatagataaaataaagagctatactgccggcaacgagccacgcgccacccgatataaaaatagtgtaagataaattcggcacttttaaaataaactttaaccccaataaataactgataattgatatggaaatagagcaaatattcattaagatgagcaatagcgttttactcacataagcaatgattttcggagaagtgcttcccagtaacactttaaatttgcctgcctgttcttctaatgatgcagtcattccgcaaagcaccccaatgagaagaggcatagcaactgcgatagcttccataaaagttttatactgttgaaattgactctgatttctcccataaaaataaagaataaatacaactgaacatactagaggtataagaatatgcaaccaaataaaggaggtgttctttgttttctggaaatcagcttttaagcacctcaataatagtctcaacttacatcgcctcctgcttatttgttctgtaatctttggcaggagcaaacgaacggctggtcagaaatgcaaggatcaacaataagacaatagaaatgaatacagcagaaggtacgaccgcccaactaagcaaaggatcatttttttcaagcagcaagccgttaggatgaataccaatagcggggcacatcattcgaattggccaactccaaggaataaaccaccaaaaagcacgagatgctggcataattcctaaaactaaagcccctatcagattaaacatgacagctattgtgaatccccactttctagctacatataaacagagagggatttgccaaagacttgttatccaaagtaatatactcgcagcaataatagaaagtgaaacgttggacaaatcagctataacgaaacccataagaaacataaaaattaaaaatacaatctgagatattagtgaataaatcataataattataatctttgcataccataatttttctaaatctacaggcaatgagtacgtaccgttataattagaggcccttttttctttttgatgagataaagaacaaaataatgaaatcatcaccggcataaagataatagaccaccagttaaaagtacctgatacaaaaaattgaatgttcattaaaaaagaaaaaactatattaagaagaggtacaaaaataatcattcttctagaaaacgttcttttaaacttcaggttttcggcttttatataatttttcatttttttgcacctcctttttcacgacttgatttgacaacttccataaacaattgctccaaattatcagctttatttatttctccttggtatcccagatggccgtcgctgataataccaatatgatctgctatttgctcgacttctgaaagaatgtgactagataaaataacagttattccttctagaggaaatgagcgaataaggtccctaagctcctgtataccaattggatctagcccgtttgttggttcatcgaggattaataatttaggatgatttaataaagcaattgcaattccaagccgctgcctcattcccatcgagaattgtcctgctcttttctttccagcatgtaacatatcgacagtttcgagcacgctgtttatccgttcctttgaaagaccgagcagcgtagcatgtactttcacattttcaaatgcagttaaattatcataaagaggtggagattctattaatgatccaatattttttaaatcagagcgtttccatttatgtccatcgaagaaaatctcgccagaagtcttccgtaaaattcccgttaaaattttgagtgtagttgatttcccagctccgtttggtcccaacaaaccataaatgctatttttttgaacggttaatgaaacatccgcaactgctgtttcttttccaaacttttttgtaagacctttggtctctaataggactgaactcatgtcactctctccctttatccttttcattatttattataatcgctttataatactcactattgcattcaacaatgatttcgtctttagtatcaggatgttcctttgtactgtatacctttccatagcggaatggatttttatcccttattttatccggatccatatagatataaggctctttcagttcttcttcagaccatctctttccatcgccatcaacaaaaaaagttttgcctattgcccctataacttttcctttaatatctttatcaactttatcctgcagctgataaatcttgccgtcatacaccacctgatcatgttttccctggtcaatcagactctccgttgtttcagatgtttcgttctcattgtcatcagtaaaatgcattgttttttttgtttcttcataaactttatctttaaactttgttaatgattggcatgcggacaacataaataaaacaataaagcaaccaaaaacaattacacatctttttagaaacactatacatcacctcactcttatgaaatttcctccaaaaagatgttaaatataaaaaatggatcaaagattctttgccatacgaacaaatatctttgtaatagagcttttcttatcgaatgatgattattctaaaatacttttatcaaaatttaatcaaaatgcatttccagctggaaactttaagtatttggcctacagcgactcgattatatgaccatataaaaagagtgtgatcaggcaacattccttacttactttagatggtttaatctcttttttcatccgtctaaaatatgttatcttgagaataccaacatagtaaaaccgtctttgtatttggcggaaagactgtggatataactacagtcatcgaatgacttttttcactcctgtctatttatcaacagtcaaataaaaaacgagtgtgaaattaaagctctttcacactcgttacttaattgtaaaaatatttttttgcgttctaactctgggaaaataattatgtataacactgagaaggcaagagtcagaacaaaatcctggttttttacttatttagagatatggcagttacaagtaattgtttgaaggaagcaagtttgcaaaacaccagttacacaccctggtgtacaaactgattcacttttccattgcggagtgatttttgagtcttgtttagatacttttacaacatccaaatcgaagtcatcgaactttgacatattagtcacctcctttcaatacctatatactatcagacaaatatcaagattttatctttttttactttttattcaaattaataatgcttttgtccataagatacaacttcagccagatattcgttaatacgagcgataaaaccattataataggcaaaatctttcgataagcagacagctgccagtccaatacctgctgctcccgaaaacattgacggagtttgcagccctttttcttttatttcatctactaacatagataaatattgatgtcccagctcgtcccatccttcagcaggaaaatgagcattcaattcaccgtacagcatacaaatgcctggtatgccatggcttaaagcagtcgacttccaaagaataagcggaactctaccaatactatgaaaattatctttttgattcacaattttcagcacttagcaaatgttggaaaacaaaggtagcaagtttgcaaaggaccagttatacaccctggtgtacaaagtgatttacttaacacttgaggagtaatttttgagtcttgtttagatacttttacaacatccaaatcgaagtcatcgaactttgacatattagtcacctcctttcaatacctatatactatcagacgaatatcaatattttatcattttttactttttattcaaattaataatgcttttgtccattctgtttttgatcctaattccatatttaaaattcctagtcctacacctattactccatccaatagaccaacgtactgtaaaggaactactttgttcccttctaacgattcatagttatggaacccaaaaatataatttttatcatagaaactaacaatctttcgtttaatcttttcaagttcatctttaaaatgctcctgcccggtcagttgattcactccaagcaaaatctgagcaattccgctaaaaccatggcatatggtaggtgaaaaaattccttgtatatcagagattgtatactttaaattctgtactccgagatttatatattgattatttcgaagggcttttccagctttaacaagcgctaaacaaacaccaggtctcccataacaccaagcatctctgctaaaatttactgtacttggctgtaatccatattgatactcttcaaagcttatgattcctttccaatacaaatgatctttatcattttgtgaaaactctagaagaaactcgaccattttttcaacagcatgctcttgaccatttactttaattccttccataagcgctgaggatagaatacaaataggaccaggtattccatgtgctaaaccgatattaaaattaccgtaaggataagattttttttcaatatcagtaaactgatgtagagatggaatatgccaacccgggactttttctcctttcacattaatgtcttctgttaacctaacgagatattttaaaatttgaattaacaaatccttcattctcttatcttcctgaaacaacaacaggtagctcgcaattccgctgacaccctctataacatcgtaatcagtcatataaagttgtctctgtttatattcatttagcaataaaggtacaacttcagccagatattcgttaatacgagcgataaaaccattataataggcaaaatcttgcgataagcagacagctgccagtccaatacctgctgctcccgaaaacattgacggagtttgcagccctttttcttttatttcatctactaacatagataaatattgatgtcccagctcgtcccatccttcagcaggaaaatgagcgttcaattcaccgtacagcatacaaatgcctggtatgccatggcttaaagcagtcgacttccaaggaataagcggaactccaccaatactatgaaaattatctttttgattcacaatttccagcactttatcgaaatttgacatttgacgagcaatttttttaacagtttcaatttctatccctgatactgtacttctgtccatttacttcgttcctcctctagtggattcatgtagttttcggactcatccatctttttatacagcggacatgtttttaataactcttcatgtttgcctattccgacaatctctccattatccatcacaatgattcggtctgccaatttagctgcaaccaatcgatgggagataaatattcctattttatccttagacaaactgaaaaaggtatcgaagatttctttttcagcaataggatctaaagcagcacttggttcgtcaagaatatacatagaagcctctctaaaatatgctcttgccaaagcaatcttttgccattgtccaccggatagctgtcttccttcatcaaaccatagtccgagctgtgtatcgaattgataggaagagtggctttttaagaaatcgaccttcacaatatcgagaacttcatgcattttgtttgtttgatgtagtttatcaatttgtccgaatcctatattttcttttaatgtcatttcgtatttcataaagtcttgaaatagcgctgcaatttggttcatataactgtccatatccagttcttttatatttattccattaattaaaatgtcgccctgctgaacttcatataagccggtaagaagcttaataaatgtacttttccctgatccgtttggtccaacaatggctacacgttctcctttatgcaatgagacattaatatgtttcagtgtctgttctccttgattgggatagataaagctgacattttgaaaaacaacagaatcaataggctcaacaatttgtttcttgtgaccttcatttttctcttcttttaattccagaaactcatacaattgattcatatagagattgctgttatagatggaataaatgcttgtcataatagattgtgagtgattttgcaccagagaaaccgatctgatataactcattacattaccgaccattatttttcccgcgaaagccgacatgatggcaataaagataatgacagctccaactaattgcactgcaatctcatatatgaggtttaaatacgttttctttctcaatatttttgtatcttgtcctataaatgtttttttgatatcccagtacttgtttaataaataatccttaaggttatacaattttaattctttaaaagaaaagtcatgtgtgagtatatagctgatataccatgatttcctttcctgtcctgcccgtttccagtgtataaaaaattcttgctgtccaatcttcaagaaataaaatagagaaatcactggaataactagtaatagcagggatactttagggttccatgacatcaaaaacgcaatggatgagagcagcgtcacacatgatgtggtcattgtgatgatggcttgaataatctgatagggcttataactaatctcttttgttaccctctctaacttgtcatatatttctggattttcgaaatccttaagagctagattactgctctttttcatgactttatagttaagtttatagccaatatttaattgaaatttaccattataatattctgaaatctgcgaaatgagttccgaaaaaaacgatacccctagatatgtcaagaaaatgctgataacaattgaaacatctttctgaatagtcacaagggaattgatcaattcttgtgaaatatatagtgacacaataggcaaaataccagtaataatactgaatacaatcaactttataaacagtgccctctctaaggtaaaaatcaatttgaatgtcttaggcatttgtttcatgataaacagcagctcttttagcttcagttgttcctttacttccatgctaaactaccattcttcttatgatatcgctgcgcatataatgaatgtctgcaaagtgtaagtattttattttccatttctctatcggttccgaataaacgattgcaatgcaggtggattacactacctatacgtgaaaatactgcttctttgttattaaattccttttttattaaacatgcgtaattagctgcagctatctttcttactttcaatatttcgtataatattctgccatcacttgtttttctgagattatcccaatctctatcagagttgcatatttcaatatacttttctctatccttcttaaattcagtacgatactcattctgcagacaatttttctctaaaaaagttaattgctcttcaaacgtaagctcgaactgttctaaaaattgtatgacagaaaccatacctgcgatttcattgcttaacgcaatgtccttcatccgatgcattctaatcatcgtttcaacaactttactatcttcacagaaaagctcttctgccgcatccattagttctggcccgccatatcgttctatctcccgctcatattgggtgataacaaactctgtaaccagccctttttctcttaagcttttcagccaattcaataattgtggaaataagctgtacagcacttctacttttccattaaatctaagtcttatatgtggctttggatctcgatatctcataaagaaatgccttactggaaatttacgggaagtttcgttataaaaatcagctatttcaaaggcaatgagctcttcttctctagtttgtttacaataaagtttaataaacagccaatcttcaaaaggcattttaattctttcgaacctattttcctctatcgagttaaagatcggtaaatccaatggtttttctggtttatttctgacaagcggaacgacgatttcccccgaatagacattttggtttctatcctttaaagcatctgcatcatgctcagcagctacaagttgtaatggctggttgtgatccgtttttttaagttcccagaaaaaaacatccaaagtacgatcatcctctatatcaattaataatcgattatctgcgttaacgatataaaatgtttgcggaaggttataagtacagtgaaattcaaaaaaagcagttttcgcctcttctatcgatgaattcgaatgcatgcttaaatcacttttgtgtaccaaccattgttcacatgataagattatttctttatatttgatttcaggaatatacttaaaatcactgtagatgctcaaccacgggaaattattccattcccttttgccgtctcttgaaatttctaataaaaaccttaaggcgtttggcattaataaaggattaaacatatgatttgattcaaaagaaagaatttcaccagtacttttatgtctggcataaaagatttggtttttattgatcccaattagaacatcttctgctttaacagaatcactgtgatgcaggacactgtttgtaaaaagagtcatttctttttcccgatagttttcattccttgttacatttccagacctgacctgattaggtacgatactcaactcacaaatttttactttactgtctattatatccttttctttgttgtgtatattttttatgacagtactgattgaatcagataagtgagtaaatcttccaaatgttttcccagcacgcgtagatccgacattgggccctaaataaagcaggactctgccattacgtaatttaagaaagaaattgagttcgaacgacaccggaatttcttcatctgcaatttcagagttgcatattctatggaatgtttcatcgtttagttgaataggagttttctttctaactgattcaaagtattttctcataaaaaattgttttatttcaggcgaaaattgctccccaaatgatgtttcttcgaagaattcattagaaggattcgtgtaagtagcaggagcaccaatgcccgcactggaacaaagcatttctaaaagaggaatctctctttcatacccataacgctccaaaaacacatttttgtacttttctaagtggtctaatctttttgcgaaggggacagccatataagtaaacacgctagccaattcacttatcgcaagagatgtttcattatctagttgaatggagaagtcatctaatccagtgtccacttgcaaaggagatgaagtctttatgagttcgttcattgtctcaatcagatttaaatacttgtactctccctttccgatagtgatccggttatattcatctatttgatattgaattttcctgcaagcccgaagaaactcatttggaatttggctgctttccgcttgagcaattaaatactgaaattgatctgaaacagtcattggcggccgtaaatttgatatcagaaactctttgtcaataaggtcttctacatattgattaattttgcttattggggtattttcatagttctctgtcaaactacgaataatttcttgataagcaacacattcaccacagagttcatttattagataaaaaaccgatgttgcacgaacactaacctcttcagattttccatctgtgctatacaacaagtaagcccgatcacctttgatgtaacaagcgggatttattgtaaaagaaagcaactcagtgtattcgctctctagttttttgattaattgatagagccattcaaaatcaacccgagcttttttgtaaaatgaatgctgattgaaagataattgattctcattagaaaaagacccaatacccactgcagaaaaaaggccaaagggtgttgttcttgttgctcgtctaattgcgtacttcaaaattgcctgccggaagttccgcttttttttcccttttaatttatccggtgactgaatgaaagtattcattgtgtcatataatgtcttactagataccagtatttgttcccgaaagagtgaatcactgccaaagtcatgcaacaactgatcggtatcctgaaagttctcatttttcaagacatgatgtactaaaggaacccgaatcatataattattttcaagtgtatataaggatttcatattagtctatagcccccctatgtattcactgtatataaaaactattcaacattttcccgcgataacctccatttaattctattttatgaaaattattataaatgtactatttataatatacatttggaaaatcaagaaagtatcaagatatagcccgataaaccccatataaaaaggattcttttcccctaagaaaagaatcctttttttattctaaacacctataagctttttttcacttttttgtttcacttgatttaacattctttcaatccagaccatcattaaatcagctaataccgccatcagcgcggtcgggatggcgcccgccaaaataatggcggttccgtttgtcgcgttcgaccctctgacgatcatatcgccgaggccgcccgccccgacgaaggtgccgatcgccgtgatgccgatggcaatgacgagcgccgttcggagacccgccataatgacggaaagcgcaagcggcagctccaccatacgaaggatttggtatttcgtcatgcccatcgcttttcccgactcgagataagcgtgctcgatattgataatgcccgtgtgcgtatttctgagaatcggcagcagtgaatacaaaaacaaagccgtgatgaccgtattggcgccgagtcccatgacgagcatcaggacggcgagcatcgcaagcgccggaacggtttgaatcacgttcgccacagcaaacacccagccggcgagacgcccgtgccttgctgtcacaattccggccggaatggcgagaatggcggcgaaaacgacgccgtacgccgacatgagaaagtgccgccagcactcatacagaacataactgccgttttgagcataatacgtaaacagctccttcatcgtgtccatccgcacatctcctttccgttattcaaagtaatgatgtttttctaaatattccttggccacgacggacggctcttttaatcggccgtcaacttcgtaattcattttctgcatcatctttgtatcaatcgcgccgatcatttgattgatcacgccctccagttcgggatgctcttttaatacatgatccggaacgacgggtgaacagtcatacggaggaaagaaccgcttatcatccttcagcgttttcagtccgtaagcgatgattcttccgtcggtggaataagcgagcgcgatatccatctttctgcttttcagcgcgtcgtaaacaaggccgatctgcatcggatacgtgccttcaaatgacattccgtatgtgttcataaaatcctgatatccgttgcctctcagcttcatccaatagttatcgacgccgaatttcagatgagacgcttcttttttgacatcggataccgtttctaaatgatacttgctggcaagctgtccggaaacggtaaagacgtatgtattatcaaagccgtaagaatcaaaccatttcatgtcatatctgttttgaaattcacgctgaacgagccgcagcgctttgtccgggtctttttccggctccatgcgaagcgtcccggtcagcgcgtctcctgtatagcgcgtcgcggcgatatcaatatcaccgtttatcaaggattgctgctgtacggcattggagccgagatttttaataacggatgttttcaacccgctgtgatgttcgatcatctgtccgagcatgctcgcgatgatttccgattcggtcatgctttgcgcgccgattttaatggtgtcctccgatgcggcgctcaatcccgggagcgagcatccgccaaggagcagcatgccgatacaggcgatggcgagcagccgttgtttgcatctattccccatgagagacctcctccttatgaagcgtcctttatgcttttcagcccgtcaggcgtgactttccgttctgtcatccccagcatgtaatcgacggctgccgccagcatcgtgaccggaacggcgcctgcgataatatactccggctggtaaaggttcaagccgataaaaatgtaatctcccagcccgcctccgccgataaaggaggcgagcgtcgcccagccgattaaataaatcgaagacgtcctgatgcccgccatgatgaccggagcggcaagcgggagctctacaagcctgatctgctcccatgccgtcatgccgattccttttcccgattccagaagatgccgattgacgccgagaatccccgtatacgtgtttctgagaatcggcagcatggaatagaaaaacagcgccgcaacggccgggatctttcctacgcctaaaagcggaataaaaaacgcaagaatggcaaggctcggcaaggtttgaatgatgttgacgatgccgatgacggcgccggctcctcttttcatcctcgtcagcacgacgccgagcggaacggcggcgagaatgcccgccatgacggcgattaatgagatgtacagatgctcccatgttttataaaacatctctcctccatttgcctgtaaaaattgcacggtctgattcatatcaattgaagcctcctcatgacatcaccgcgagctgattctcttctccccagatggagtcatagacgatgtcaacgaggcttgcccttgtcacgattcccgttagccggccggcttcatcaaggaccggcacaaatttcatgcctctttttaaaattttatggacggcgtcgcggagcagagtgccgcttctgaccgtgtacagatcccggtcaagcacttccgcgacggttaccgcttgtcttcgtttgcggtcaatcatctccacatcgacataaccttggagaacgttcttttcatcaatgacgagcagcgaatccacccgctcggcacgcatcagctgaatggcggctgacagtgttttctcaggtgttaccgtcacgggatcgggattcatgatctgctccacccgttcaatatcagggctggatgattggatcagccgttccttgccgataaactcctcaacaaattcattcgccggaaatctgagaatctcatcaggcgttccggcctggacgatttctcccgctttcagaatgacgattctgtccgcaagcttgatggcttcgtccatatcatgggtaacaaatacgatggttttatgtaaggttttttgcagttttttaaattcttcctgaagggaatctctcgtaatcgggtcaagcgccccgaacggttcatccattaagatgagcggcggctctgcggcaagtgcccgtaatacacctattcgctgctgctgtcctccgctcagttcatgagggtaacggtctaaatattcaggccccatatcaacgagctttaaaagctcctgcgcccgttccttccgtttttcggcaggatgctttaaaagcttcggaacgagcgtaatgttctgctgaatggtcatatgcggaaacagcccgatctgctggatgacatagccgatgcttcttctgagttccaccgggtcttgttccataatgtttcggccctctatcaggattctgccttctgtcggttcaattaagcggttgatcattttcatcgtcgtcgttttgccgcagccgctcggcccgataaaacaaataaattcgcctttggcgatattcaggttgatgctgttgacggcttttttcccgcctttatacattttcgagacattttctaatgtcagcaaacactcacacctccatgattaagtttattcaattcgttaaattcaaatttaacttttcagacaattgaacgtttcccattataaattaaactttgtaaattaaaaagtttacaatttgtccatattatatataaaggttgtgtaagcactgattaacccgtattgaccggcaaagttcttcttattgctccggattactgccaaattctctcggaagagcatttccgccggtttaaaaatgtggtatattgacatcggaattgctgactgaaaggattgaaactgttggagaaagatccgttacacgtaatcgaacaagctgaagatcatttgatagaacgaatcgctgaaaatatgcatacattcggaatgcccgcgacggtggggcgcattttaggcattatttatatgaaccgcaagccgatgaccttaactgaattatcagaagcgaccggcatgagcaagacgagaatgagtcaggcggtccgtgaaatgcttgacgtcaatctggcggaaaaagtgtttgaaaaaggcgtccgcaaagatttatacgacgtcgagcaggattattaccaaacctttattacgctgtttacggccacctggagcaaggtcgtcagcaaaaataaaatgatgcataaaaagctgaaccgcgaactgacggccgtccttgaaaacggcgtgccggaagaagctgaggaaaaaatcaacgaactgctgaaagaattaaaggattggcttgattactacaactggatcagccgtctgatcgagttttttgaaagcgaagaaattttcaagcatgttccgaagccataagaaaaaaacgccctgacccgcaaggcgtttttttcatgccgcattcggcgctttggttcgttttttctttctcaccggactcagcgcccgctccagccatgccatcacaagatctgcgataacggccatcagcgctgtcggaatggcgccggccaaaataatcgcggttccgttcgtggcgtttgagcccctgacaataatgtcaccgagtccgcccgcgccgacaaacgtaccgattgccgtaatgccgatcgcgatgacgagcgccgtccgcagccccgccatgatgacggaaagcgcaagcggcagctccaccatgcggagcacctgaaatttggtcatgcccatcgcttttcccgattcaagataagcgtgttcaatgctggcgattcccgtgtacgtattccggatgatcggaagaagcgaatataaaaacagcgacaatatcaccgtattggcgccgagccccatgacgagcatcagcaccgcaagcatcgcaagcgccggcacggtctgaatcacgtttgtcaccgcgaatacccagccgcttaatgttctgtacctggcaatgaagatgccgagcggaaccccgacgatcgccgcaaataaaacgccgtataccgacatgagaaaatggcggtaaaactcctgaagcacataggcgccgttttgagaataataagtgccgagctgctgcagcacttccatttgctccacctcatttcttattcaaaataatgatgtttctccaaaaattctttagcgacgacggacggttctttcagcttgccatccacctcgtaattcaattcctgcatcgtttccgtatcgattttgccgatcagtttattcacaatgcccttcagttcaggatgctgcttcagcacgctgtcgggaatgaccggcgaacagtcatacggcgggaaaaactgcttgtcgtcttttaaaattttcagatcgtacgctttaatccgtccgtccgttgaataggcgaggacggcgtccattttcccgtttttcacggcatcgtatacaagtccgatctgcatcggataggttgtgccgaattcaaaaccgtacgtgtcggtaaaacctttatagccgtcaccttttcttttcagccacgcattgtctacaccgagcttaaattgacccgcatgcttcttaatatcggacactttgtctaaatggtcttttttcgcaagctctttcgtgacggtaaaagcgtatgtgttctcaaatccgtaagaatcaaaccatttgtaatggaagcgtttctcaaattctttctgtacgatggataatgcttttttcgggtctttttccgcttccatgccgagggtgctcgttaaatccgttcccgagtagcgcgtcgcggcgatatcgatttcaccgccgagcatcgcttgctgctggacatagttcgatccgaggtttttaattaatgccgtattcaagtctgtattgtgctcaatcatctgtgcgatcatattggcgataatttctgattccgtcatgctttgcgccccgattttaatcgtatcatcggaagccccgctcaggccgggaagggaacagccgcctagaagcagagcagctgacagcgccagtccgcacatccatctcttttggtttcttttcacaacagccaactccttatgatacttccttcagtcctttcagccctttcggcgtcaccttccgttccgtcgccgccagcagataatcaatgataatggctaaaatggtgaccggcacggcgccgccgataatatattcaggctgatagagattcaggccaataaaaatatagtctccgagcccgccgcccccgataaaggaagcaagcgtcgcccagccgatcagataaatggtggatgtgcggatgcccgccatgatcaccggaaccgcaagcggcagttccacaagcctgatctgctcccagaccgtcatgccgatgccttttcccgattccagcagatttttgtttacgccttgaatgccggtatacgtgttccggagaatcggcagcaccgaatagaaaaacagcgcgacgatcgcgggcacctttcccacgcctaacagcgggataaaaaacgccagtatcgcgagactcggcaaggtctgcacaatgttgacggcgccgatgacggcgcctgcgccctttttcattctcgtcagcgccactccgagcggaacggcgacgacaatgcctaatatgacggcgataatcgaaatgtataaatgctcccacgttttatataacagttctccgccgttcgtctgcaaaaacttaatcatttcattcattgtaagcgttcctccccttgtcagcctgtcaccagctggtcttcctcgccccagattgaatcgtaaacgatgtcgacaaggctcgctctcgtgacaattccgactaaatgcctttgttcatcaacgacgggtacatatttcattccgcgctttaaaattttgcgtacggtatcgcgcagcagtgtcccctgctcgaccgtatacagatcagagcggagcacgtcgccgacgaggctcgcttttttccggttctgatcaatgatttcgacatccacatatccttgcagcacattcaggtcatcaacgacaagcagggaatcgacacggtgttcccgcatcacctgtatcgcctgcgaaagcgttttgtccgccgtaacggtgacaggttttttgttcatcatctgctcgacgcgttcaatatccggtcttgattgcaataaccgttctttgccgataaattcttcaacaaactcattagccggattcctgaggatgtcatcaggagtgccggcctgaacgatctctcccgcttttaaaatgacgatccggtcagccagcttaatggcttcatccatatcgtgggttacaaacacaatcgttttattcaatgttctttgcagttttttgaattcttcctgaagggaatcccgcgtaatcgggtcaagcgctccgaacggttcatccatgagaataagaggcggttccgctgccagggcgcgcagcacgccgattctctgctgctgtcccccgctcagctcgtgaggatagcggtctaaatattccgggcccatatcgacgagcttcaaaagctcccgcgcccgttccttccgcttttgttccggccatttcagcagtttcggcacgagggaaatgttctgctgaatggtcatatgagggaaaagtccgatctgctgaatgacgtagccgattttccgtctcagctccaccgggtcctgctccataatgttttcgccatcgataaaaatctttccggatgacggctcaatcagtctgttaatcattttcatcgtcgtcgtttttccgcagccgctcggcccgataaaacaaataaactcgcctttttcgatatttaaatcaatgctgttgacagctttttttccgcctttatagacttttgatacattttctaatctcagcaatctgcgcacctccgaagggttccgttatttttctgaaaagtataatctttattataagatgaaatttgtaaaataaaaagtttacaatgtgttgaaattatatacaatatacgtattttttcatgttatcccgctgacaatgcggatgttcttacaatcgctcccgatagctcgcatatcctgccgcatcatctttttcatcaactgtaaaaaatatgatatattgtcagcatgaaaagccagtgaagggatgatcagccgtggaaaaaaacgctcttgatatcatcgggcatgctgaagagcatctcattgagagaatcgccgagaatatgcatacattcggaatgccggccacactgggacgtgtgctcggtattatttatatgaaccgcaagccgatgacgttaaatgagctgtcagaggcgaccgggatgagcaaaacgaggatgagccaggtggtccgcgaaatgaccgatgccaatctggctgaaaaagtgtttgaaaaaggcgttcggaaagacctttacgacgttgagcgtgattattaccagacgtttatctccctgtttacggcaaattggacaaaggcggtcagcaaaaacaaaatgctctataaaaagctgaaccgcgagctgactgagcttctggaatcggaaaatctcagtcccgatattgaagaaaaagcccgtcagcttttggatgaactgacggattggctccattattatgactggctgagccgtttgatagaattttttgagagtgaagaagtgtttcagcatgtgccgaaaatagaaaaaagcagcacccgaagataaccgggcgctgcttttttaagtcaggaaaccaatatcgggaacatgcctttcagaccggcgccgatcatgccgatcgccaccaccgccaaaatcagccccatcagccgggtaatgacgttcatttcggttttcccgagcttattgctgatgaaagatgaatagtgaaagaagatgaacgtcatcgcgatgacggccgcaatgccgataagcacgctgatgtaatggaagatgccgccatggccggctgacagactcatcaccgtcgcgatcgtaccgggtccggcgataatcggaatcgacaaaggcgtcacagatatatcagctttctccttgctctcccctttctcttcatgatggagagactgcacatgagatttcttcgcgttcagcagattataagcgatgccgaaaataaaaatgccgcccgcgatacgtaaggcatgaatgttaatgtcaaacagtttaaagatcagatggccgaagattaaaaaagccgccaagatgataaacgacagcacggaagccttgcgcgcgatcgctgtccgttctttctccgggtacccttccgtcagtgaaagaaaaatcggcacgtttccgatgggattggagactgcaaacagtgaaatgaagacatgaatgatgaatgaaaacatgcgtacctccttatgacttgccattattgagttatgttttgttctccgctgtttcttatgcatggtttttaccccgggggctgctttttataacctcagccggacaatctggaaacagaaaaaaccgtccttgtaaggacggttttttctgtttgctatctccataagccttttccgaatttcaacagccgataaagcattttcaatttttttagcatgcgttaatttcctttttcactctgaatcaatgcgccgagagacatgatatctatcagctccaataaaattctaccataaagggtactttttctctattatcaattcatagagaaggtgatttgtatatctttagaaaactccgttacatccgtcctattttcttttataatgtaaatattgaacaaaatccctatattacttgtaaaaggagttttagaatgtattgttctcaatgcggccatcatactgatggcggaaagttttgtgaaaagtgcggggcgccccagcccgggcagggaggcgcaggccaaacgcaaggccaggccgctcaggccggcgccgcggctaagcaggcttcaaagcaatttgccttattcgtgcttgatgtgttaaagcgaccgtatcaaacatgtaaaacgacaggcggcgaacagcttgtcagcagcatcatcaacatggtgcttttctgtctggtgacgccgattatgttttatattctcctatcagacggctttcgtgacatcagttttaccgcggttgtggtcaaaccggcgcttacctttgcattatgcgttttttgcctgtatctcttgatttttatcgctttgaaggccggcggcgcccaggtgtcatttaaagattcgctgtccagattcggggcctttttgattccgtttacagctattttgcttcttgcacttatttttatgctgcttcatacaaccgtttgcttcaccattctggctgtcggtcttttaggagcggcgtttgccgtgcctccgctcatgctggcgagctatcagcatcagctcactactaaggcggatatcatttattctgttatcgtcatctatttgatcatttgcgtaacatttcaattcacgatcaagcattatataaaagaactcatgaattatttcttcttttaaaaacggaaacccccgccgcctgattggcgcgggggtttttttattgaatggatgttaaataaattcttccgtctttaacaacgccgccatacgtccaattgtatgatctgagcttcggactcccgccggctttcgtaatataaaactcctcgtacgtatgaatcgtcagatgagagcctttctgtgaaaagcttttgacattcacttcattaaatacttcggtcgtcccctcgctgtgcagttttttgaccagtttctgctgatctgcatacaaagggcttccctcttctaaattgcccgccatgatggcaaaattgttaaggctgacggcgcttgattgatttgtcaggtaatcagtcataaacgatgtgacttgctcgtttgtcacgctgcctgaagctgtatttcctttggaagatgcccatgcggatgtataggttttcggctggtcgttttttattttttttacatttgtcccagaagaatctgaggctggatcagctttttcgaaaacccattttttatgttttgtatcatatgagagtacataatgaaagctcggctcagcctcttccatatcaggcttcgtattcccgtcgaaataagcagactcatgaagctctttacccgtaacagttacttgccagcggccgttctcttgagaaatcgcaaatgaatccagatcaaagcttgtctctttatactgatccttcaaaaaggtgccggaactcttcatgccggataccacttctttcgtctgctctttccaggcggaaccagcctcggtcatctgatcggtatttccgtctgccatcgcttttgtatactgcttcgttgttttgacaatcgtgtccatgattgtttgttgtgtatcttgatccgggataagcgttaattccatatcagtaccgttgatcggaacatcggcagttttcatttttccccaaggaaaatcagcctccacggcggctgtcatggaaccgtcagttaagagcggaccgtatgtaacggatgtaaacggatctttatggacggacttgccgtttatcagcagatcgcctttcgcgcttttgaagctgtctgccggagtgaatgtcacatcctcggcatctaacggcaggtcaaactcaacattccggctgccggccgcctctgcctcttgttttttgacaacgtcaaccgtctcatttttaagcttggcttccgccgtgtagacaccgggtgcatacgggccgaagatttgggtttcatcggcttttttgaccgtacctgttttctcgctgttgatataaagatcggcgcctttataattgctggtgacgcggaaataaaccggatcgactttcagttcgtaatggtcaaacaaaagaagggtttttccctctttttttacgtataccgcatctttttctgatgaattgccgcgaagcgctgccagcagttcatcgtgtttctttgcgtatgcaaggagcggtttgacattggtctcattcagcttcagttttttgtctgaaggagtgagcagggctgcgagctttttcgtgtccccgtcatgaaccgcctgttcgaattgatccgtgagccttttttcagatgtcagccaggctccgattttatatgcggcaatcaataagatcagcgctgcggcaatgccgccccacatgaagagcgtttttttagggatcggctttctcatttgtgaagcaggttcagccgcttttacagccgcctgccgctccagccggcttcctttcccgatcggttttccgcattctttacagaaatgcgcttcttcattgttctgctggccgcaatgcttacaaaaaaacatgactttcctcctattcaatctgcaaaacttgtataacttttcctatgtttcatattttataataaagtagaatgattttggagttattttcaaaaatagctgtcgatcataacggaggaggagaaacggacatgcaaaaactgagcatccgaaaagccgcggagccggatgaagcgctgtatgaactattgctgctggccgatccgtcgaaagagattgtcgatgattatcttgtaagaggagaatgctatacggcctggacgtcagacgagcttgcaggggtttacgttttattgcaaacaaggcctaaaacgatagaaatcgtaaacatcgcggtaaaagaatcgctgcagaacaggggattcggaaaacagctggtgcgggatgccattgaaaaagcgagacaatcgggggctgacacgattgaaatcggcaccggaaattccagtattcatcagctgtcactctatcaaaaatgcggattccgcattcaggctgtcgaccatgatttttttatcagacattatgatgaagacatttttgaaaacggcattcaatgccgggatatgatacggctttatttggatttatgataaaaagggcgccggctgacatcggcgccccttcgtttaccattcagacggattgatccgcttgtttctctgtatttctttgacttccttgtctgactgaaaaaacagcaaaaacgatcgtaagggtcagtccgaccgccgcaaaaatataatccgcattcatcaacagcagaagccctgtgtagacagcggccgacagcggttcacccattttgacaatggaaaaaatcagtgcaaagacccttccgaaatatgcggccggaaccgtcttttggaaatacagcaccgtttgcacatcaatatacgagatgatgatgccaagcaccaggaagatgatgcactcaaacccatgaaggggaaaaaacaggagcataatgagcagtcccgctgccgttaacgtccgcgggtacagccggttcaagcgttttgtattccatttgaaaaatacggccagattgcccaaaagcatccccgcctgaaacatagaatacatgacggcaaaccatacagaatagttctgctgaaaacgctccacagcaagaatcggccccattactgaaataaggccggcaatgacgagatttacgacgaaaaagtatccgaccgatgtcagccatgccgcatttcctttcagcattctgtaaccggcttttacatcttcagttccgttgcttttttcattgggctgttctgaaatacgaataaacgcgataaatgccgcagagatcaaaaaagcagttccgtttatggcaaacagcagcccgaacggaatagccgcaatcatgatcccgctgatcaattttccgacgatgagtccgatcaagtcactcgtattgatcagagatgtcgcctgatcaagatgctgtttgcggacgagcaacggaatgatcgcgactttcgccggcgcaaacagcatcgattgcagagatagacaaaaggcgcacaccccggctatccacacggttaataaatcgttcgcgctgagcaccgccaagaggatcatgatgacggcccggcccgtattgcacaaatacaagatcgacttttttcggaataaatcaatcagcggccccgccagcacgccaaatgtcaacggcacgagttcgataaaagaaataacgccgactagaattttgctgccggtcaattctaacactaacagcggcaaagcaatgagccagaccccatccgctgctgaagaaaacacctgtgcacaccaaagctttgcatagttcggtgttcgatatgtcatatcaggcccttttttgatcctcgtcatcagaaacaccgccgaaccattccagcgttctccatgattcccgtctttccgtataatcctcttccatcacctcaaatacaatgccggtatcttgattccgataaagctcctgcaaagtatcggcagcccgtctcagcagctcctcagcgatcgtcccttcactcggatggcggccctcaaaacagcggacgcccccatgcgggaacgcaagctggcgaaatgagctgaagtgataatgcttaatgctctcttttatcgacagaaactgaaagaaatcgggatatttcagctgatcatttctgaacataagcgcggaagataagtgagtctgataggtaatcgcccagtggcacagatcccacgtaataccgacatgcttcagatccagctgcaccagctctgtaaaatcctcaggataaatgaaaatcggatcaaaatcctctcccagattcccgatgatcggaaggttttccacaccgatccaaatgtctgtccctttcagccgctcatcaaactccgcgaaaaactcaacgatttttttacggtttccttccaggtcatagacttgaaattcctcaaccgtcataaattgattcgcatgaacggttatgcctttggcaccgtatttcacagcgagctccgcaaagtgataaagctgttttttgatgtgatcttcatgcacataatcggcatgatctgtcgggaaatgcagcgtcaataatgaaggatcaagctgtttcgcatattccagcgtctgattaaatgttttgagataatccgcttccgcaaaggaatggccgtcaaaaatattcgcttccagaccgtatcccgcttccacccatttctcatcgatttgcttcggatcaagtccgaaaaacggaatttgagcaatcataggacagtcaccatgttcctctcacaagcataaacgcttccgcagccgaaaaacccgcttttgctccccacacacgggcattatgttcgatcgcctgcaaagagcggggatgagggaagtctctgagctcggaaccgtaacacgccatcgatttcaatttcgtttcaagctcgtcttcaatattaacgaagaaattggcatgaaactgatccttctgacagtaattccattccgtcgaagacaatgtttcataggcaaaaacccgttttaccgtatgaccgggaagcggacgggttgccgtcatgaccgctctgaatacgacagagtggtcaatattaatgtcaccgccgtactgggtatacacaatgtcaggctgaaaacgattgatttgtttctccgcttccttcacgacatccagcaaatccattgaatccattctgttatcaggaaggttcagcctgacaaaatcatggatgcccaaagtgctgagcgcctgctccgtttcttgattagaatgctccataacggaatcttcaggctttttgtaatccgtttttcttgatgacttgccttccgccataatgactgccgacacgctgtcaccttggcggacatgtttggcgagcgtgccgccgacgccgataatttcatcgtcgggatgcgctgcaaataccattactttcatcatattgccctcctttaactaacatttcagctgtatccgctccgcagttcatcagcatatcgagcatggagaggtgagggatatgctccccgaataattgaggatagccaaaatgtcggatctgctgatactcaatgacaattccgtttctttcaaaatcgctttctattaaatagtcggaaccctgactgcctgaataataacggtccgcccccagctcctgacaaagcgctaaaacaaaatcgctttttttctccttccggcattcaagctcagagacataacagagcggcgtttcaattcggagctcttttcggaaaaattcaatgatgtgcatattcaaatcatggagatattcccactcccgctgatagacatcttgaaaaaaatgctggtatcgctcaaaatagggagctttcgcatagttcatcttaatcgccatccaatgttttttccgccaatcctgtgtctggtcgattttcatatgccgaagctctatgtctttatattgtttcatctgcaaaggcactgtcagccatctggggccttgcggcgttttgattctgttgcggttgagaaatccttttttctcaaattgagctgtgtcatgaatggcaaacagatccgacttatacattttttcaaaaaaaccgtaccacggcagataactggattgatggccgcttattgttttcattccggtttcgtaaaaagtcggcattgtttttcttcagctccccaatatcgtttcggtctcgcgatttctttactgtgtgaatagccaaaatcagcccattgaagcttgcggcaaatggcgaattgcagggcgtcacgcatcaataagtaagaggcctgcgctttttttcccgccaggctgtttacattctgccaataatagaaatgagagcggtcatagagaaaaatactgctgctgatcagcgtctcatcctgatatgctccgatccaaaacattcggtccgcaaacgtgtcaagcagcttttggaaaaagccctggctcagcacataagccgcgccgattgacgctgtatgctctttgtagaggtcataaaacgcgctaagttcttttcgcccgatcagccgggtgacaatattctctttttcagcgtatctgactgccgtccgggcttttccggaaatacccgtccaaagctcgtcaaacgtgtccggaagcgaaagaatccgtgtcgccttttccgtccatccttccctgatttcttctgtaaaagaagtctgaccgtacggcagcagcatccgggatatgttccggccgaatatggcctggatttcactttgaagccattcaaatgagatggggcgatctgaaataacgccgccgtatccgatcatattgccggataatacgcccttctgttcaaaaagcggaagatagatgacttgtcctccgtccgttgtcagtctgacagggtgaaatgacgtgccgggaagctcttccatgaggattccccaatcatagctttgaaacaatcccgcctgatacatgtcagcggcccgatcccatgcctggcgggtcgtgcatactgctgttttttgcatagttatcaccactattcagtcttattctgttgctcacaatatgataaaacggattcggctatatatctgacttgctccttttgaagaggaggtttaaacggcagggaaagaactctcttccaaagcgggtcttccccgccttcccccgcgtatgtttcataaatcggaatacgtccgaggggaagatagttccagcatgtttggatgcctctttcggctaaataaacggaacacccgtaccgctcttcatcccggggaaatacaaccgttaaataattcagatgttctccttcttggggctggatcattcttatgccgtttgtttctcccgcctttgcaaagatttctcccgccgtctgtaagtttcggagcgaagctgttacaagctgatccatacgtgaaagctgatcatcaataatggcttcccttgccggatgcatgcgaagcacgggtacaacagccggtttatccggcagagtttcgagctttgtggctttcatggaaggcatggcgcccgcttttctaaacatatatgaaataggatgatgccgtttccgtttcattacagcttggattctttgatttctgatatagattcgatagtcagctgccacttggctgcgctgttccatcgggagatttgctttttgccgaagccattctttcggcgcgattaacgcgccgcctccgatactcgcaagcggctttgaggggccgaagcttaaaatgccgaaatcgcccaaaccgccggcaaatgtatccgcttgttttgtaaacatggcttgagcggcatcatcaatgacagcaattccgttttccttcgcccagtcaatgatagcggtattttctctccggccgtatacatgcgtgaggataaccgcacacgtctgccttgtcactttttttttgacatcctcaaaagataaggatagatgctcatccagctgcgcaaacacaggcgtcgcaccggattgcagtacggcatcaatgacattcgggcagctgaaggatgagaaaatcacttctttccccggcccggcccccgaataagttaatgcgagcaccagtgccgcactgccgctggatgtcagcacaaccccttttccgtaacgtttttccagtttttcagtcagtccgctttgtccggcagtaagcaagtgtttcactgcgcgcagacggccgctgacggaaaactgtccgggataaacgggatatttgaccacttccgggtttttaggaaagtgaaagtttgtgcttttgtctttcatcttttatgatctccaggccttcattcagacttactttcggagcgtaaccgagcaaacgtttcgccttctcgattgacggcgcccgtttaaaaatctcgatgtcttttcccctcacgccgtcttcgcccagctttttaaacagatagttatccttctctctgcctgagagcacattgactttttcagccagttcttttatcgtgatcggctggtcgttcccgatattgaagtcttcaaagacggctccttcatgaatgagagcgagataagttccggtgacgatatcactgatgtagctgaagcagcgtatttgtccgccgtccccgtaaagaggcagctcagagccattctcggccaggctgaaaaacttgttgatgacaaaatcctcgcgctgtttcggcccgtatacattaaaataccggacgacccgaatatgaagttcgtcggaagcctgttctctcaaatattcctctgattgcagtttggcttttccgtaagccgatttcggaagctttctgcttgtctcggtataaggaaaatccggtgaatctccgaacacttctgaactcgatgagaaaagaagtgtgctgattcccaattcaccgcatacctcggtgacgtttttcgttccttcaaaattgacccgtatgacgtcttcttcattgcttcggcagctgtctactccgaccattgccgccaaatggacaaccgcatccgctccccgcagtgattcgcggagggacgaccggtcaagaatatccgtttggcggtattcagtgtcaaaagccggctccttttgatctgcaatgatggtgtgataacctttatcctgtaataatgccgccagttcgcttccgataaaaccggctcctccgataatcgcaatatgtttcatgatcctacctcctggctgatagtcaaaacttcttttatagacttgacaatatagctgcaatcctcatctgataactggctgtaaagaggcagtgacacgatctcccggaaaacacgttcagttaccggaagctcggcaggaaaatgttttttatagtaaggatgcaaatgcacgggaataaagtgcacgctcagcccgatttgtttttctttcattttctcaataaacagatctctgtccataccgccgttttctcgaatgcgcaaaataaataaatgccatgagtgcgttatgccgcttggaatgtcagaaagcggaagcgccgctttgtcagattgacctgacagttcacgtacataaaattgagcgatctgttcccgtttttcttgaatgtcgtttgagcgcttcaattgaaccagaccgagcgcggcctgaatatccgtcatattatatttaaagcccggcagtaaaacgtcgtatctccagctgcctttttcaccgtaccggttccaggcattttttgtgatgccgtgccatccgtacagcctcgctctttctgcggcctgttcgtctttcatgacgagggctccgccttcccccgttgtaatatttttggtggcataaaagctgaagcacacggcatcgccgtgagtgccgatcatgcttccattatattttgtaccgagcgcatgagcggcgtcttcaatcagatacaatccgttttctttacaaatggattgcaagttttccagatcagccggatagccggcaaaatgaaccgcaattaccgcttttgtgcgcggcgttattttcttcctgacatcttcgggatcggcacatagacttttctcgcatatatccgcaaacaccggaacggctccggcgtgcagaatgacattgacactggaacagaacgtgaagctcggcacgatgacttcatcgccttctcccacaccgagcgccaataaagccatatgtaatgcagcggtgcctgaattacagctgatgacgtgttcggctcctatacattctcccagctttttttcaaaatcgattaccttcgggcctttcgaaatccagcccgattgaatcgtttcggttacgcttgcgatttcttcgtttgtcatatcaggtctgtgaaaagagataaatcgattactaatgacggttccctcctataaagtgacaactctgcaattgtcggctgatttttccttgcatacatttcttgtgtcaaagataatcggtgaggcatccttcaaaatactgtagtcgatgacatcgtgatctgtatgaatgatgatgacgtcgtactgattgatttgttcttttgtgaaagggacagattgtttgcggcttccgtcattcaagcggatcccgctgataaacggatcatgataatcaatcgcgcatcccttgtccatcaattcttccattatcgtaaacactgaggattcacgcgggtcatttgtattttttttataagcggcccctattattaagatgctgcatttgtctttgcccgccagtttcaaagcatagtcagagacagaaatcggcatgttggaattgatttcgtccgcgagatcaattaattttgtctgcagccctttttcattcgcgatccatttgaagtaaaaagggtcaatcgggatacaatggcctccgactccggggcctgggataaatttttgaaagccgaacggcttcgtgtccgccgcgcagatgacttcccatatatcaatatcaagttcacggcaattaagcgccatttcattgataagagctatattgacataacgataagtattctctaggagtttagctgtttcagctacttcgggtgaggtgaccgggtgaatgcttgtaacaatggtactgtaaaacgctgaggcaagttctgtgcaagtctgtgtggtaccgccgactactttaggaatatctgaaacttcatattgcctgttgcccggatcgattctttccggagaataagccgtaaaaaagtctgttcctattttcatgccgcggcttgatgccattctgtcggcaatcttttttttcgttgttccgggataggtggtgctttctaaaattaaaagctgatgctgccttccataagcaatcatgctgtcaactgcactgtcgatgtaggttaaatcggggatcttgtcttttttgttcaggggtgtcggcacacatatcacaatgatgtcgcatttttggatgagcgacatgtcggcgctgatttgaaagcgttttgtttgtaaagccgagttcagtctgtcgtcctctatatcttgaatatggctgcttccggcggctaacaaggaaaccttttcactgtttttgtcgaatccgataacattgtatcctttatcgacacattccagcgcaagagggaatcccacatatcccatgcctaacacgcctacaatcgcctgcttcgtttcaatcagatgtaacagccgtttttgaccaaggttgctggcttcttttgtgacagtattcatttttcgccccctaatagatagaaaagagtattgttttttacaatttaaaacaaatatcgatcgatatcgcaattataacaaaagttaaaatttgataaatgagttttacatccttttataaattaggtattatctatttatttttcttttatttgtaaaataaaatcctgtcaaatggtatatatctggtaacgagtgagaaaatctcccttaattgagagaatatacagaaaacaatataaaaaaaacaggccgaagcctgtttttttattctttcactgcctcagttacagccgcggaaacgagtgatcccgctttctctaatcgttctttgctgatgtgtttcatattatcattttcggtgtgataccagggccccggctcctgtgtatcggggctgagccaaatccagttagccgacggaatccccgcttcataaaaagagacatggtctgagtaaccgagctgaatcagatttggcttgaccaaccgggatttttcagcggctttttcagcataccggacgctcgggttttccttgccgtcaggagtcgtgacacacatttgactcgcttcttcccagtcagtcgcaatcatatcggcattaaaattggcttggctgtgctttctttcattgttcgtgagtgtactgacgtaataagatgaacccgcagaccataattcttctgcaccgaacaggataaagcggatctctttgtctttcggtatgtgtttgagttgcttgctgatttccagaacggcagatgtgcctgaggcgttatcatccgctccgggtgcgccttttacgctgtcataatgcgctgtgacataaataatatcagcatcagaagagttggcctgtgccgctttgcgcgttcctataatattttgtgaggtgcggtttttatagtttttaaattgaatgactgcctgcttttcctgcagcaatgcttcaccgtcttcttttttcatacccgccgccggtatcgtgattcctttatcggtatgcggacggacggcgagcggttttgttgtctgattataaataatgactgctttggctcccgcttgttcggcatgtttgatcttttgagaaacggggatctttccttcgcgtatcactgcaatctttcctttggctcctgttacgtcatcgcgtgatccgcagccgccgtcaaaaatccctccctcaattctcagctctttttcaacagcggattgatcagcggagcggagcggaaattcatgatctcccgctgtgactgaacctgaaaagtattttttcaacggaaatgtctgtactttgacactggcgccctgagcccgcaggcgattcgatatgtattcagccgcttccttttctttcgcagttccggtttcccgcggaccaatggtttcgctcagatcatgcatcgtgtccaatgcatcatcagcatcaaaaaccggcgcggtcacggctgaataagcatgagtttcggacagcggcccggcagacgcgccccatatgacgcttgctgccaccgcggctgacataaatgaaaatttcatcataatccctcctcttattaacacctcttccctttcgattgaagaacactgattcctttaaaaaggggaaaaatgaatattattgaccaaatgaagatgatgaaaaaggagggaaaagcccgggagcataaaaaaacgccgggagaatatctcccggcgtccattccattacttattcaagttatagaaagagttgataccgtggtattgagcagtttcagccaactgatcttcgatgcgaagaagctggttgtatttcgcaacacggtccgtacgggacggagcacctgttttgatttgtcctgcattagttgccacagcgatgtcagcgattgtgctgtcttcagtttcacctgaacggtgagagataacggcagtgtagcccgcgcgtttcgccatttcgatcgcatcgaatgtttcagtcaatgtaccgatttggtttactttgatcaggatagagttgcctacgccgtttttgataccttcagcaagctttttcgtgtttgtaacgaaaaggtcgtcaccgacaagctgaacttttttgccaagacgctctgtaagaagtttgtggccttcccagtcgttctcgtcaagtccgtcttcgatagagatgattgggtatttagaaaccatttcttcgtaccagtcaaccatttcagcagatgttttcacaacgccttcgccagacagatggtatttgccgtcttctttgttgtagaactcagaagatgcagcatccatagcaagtttcacttcttcgccaggtttgaagccggctttttcgattgcttcaacgattgtttgaagcgcttcttcgttagaaccaaggttcggagcgaatccgccttcgtcacctacagctgtgttcattcctttagcagaaagaacggatttcaggctgtggaagatttgagcgcccatgcgaagcgcttcacggaagttaggcgcgcctacaggcataatcatgaattcttgaatgtctacgttgttgtcagcatgttctccgccgtttacgatgttcatcatcggtacaggaagcgtttttgagttaaatcctccaaggtattggtaaagaggaatctgtaagaaatcagcagctgcgcgcgcacaagccatagatacgccaaggattgcgttcgcaccgagtttgcctttgttttcagttccgtcaagctcgattaaaagctgatcgattgcgttttgttcagttacgtcaaagccgagaagctctggagaaatgatttcgtttacgttgttaacagcagttaacacgccttttccaaggtaacggtctttgtcgccgtcacgaagctcaaccgcttcgtattcacctgtagaagctccgcttggcactaatgcgcggccgaaagctcctgtttctgtatatacttcaacttcaactgttgggttgccgcgggagtcaaggacttcgcgtgcataaacatcaacaatgtatggcatgagtttgtctctccttttgatttacgcttatttttgaattaaagatgttccggtcatttctttcggtttttcaacaccgagaaggtctaataacgttggtgcgaggtcgcctaggattccgccttcgcgcagcgtcacgccttctttcgtcacaatgacagggactgggtttgtcgtatgggcagtgtgcggttcgcctgtttctgtaatcagaatgtccgcattaccgtgatcagcggtaatgatggcatgtccgcctttagcgatgatggcgtcaaccacttcgcctaagcattcgtccactgcttcaattgctttaatcgtcggttcgaccattccggagtggccgaccatgtcagggtttgcaaagttcaggatgatcgcgtcgtgcttgtcagccgcgatttcttttacaagagcatccttcacttcatacgcgctcatttcaggcttcaggtcatatgtcgcgaccttcggcgagttaatgaggatgcgctcttcgcccgggaattcttcttcgcggccgccgctcataaagaacgtaacgtgcggatacttttcagtttctgcaatgcgaagctgttttaacccgtgctgtgctaatacttcaccgaccgtattgtcaaggtttaccggtttaaaagccacatatccgtcaacagattcactgaagtgagtcaggcagacgaaatacaggtttttcggatgattttcaccgcggtcgaaatcgcggaaatctttgttggtaaacgtgtttgaaatctggatggcgcggtctggtctgaaattatagaaaatcacagaatcgccgtcatgaattttcgcaacgggttcaccgttttcttttgtgatgacggacggaatgacgaattcatcatgaatgccgttcgcataagaatcgtcgactacatccatcgcgctgcggtaagacgggccttcgccgtaagccattgcgcggtacgctttttccacacggtcccagcgtttgtcgcggtccatggagtagtagcgtccggaaatgctggcgatttcgccgacaccgatttcttcgatctgctcattcagctgctgaatgtaagttttcgctgtttgcggacctacatcacggccgtcgaggaaaccgtgaatatacaccttcgtcagtccttcacttttcgcaagcttcagcagcgcgaataaatgattgatatgactgtgtacgcctccgtcagaaagaaggccgaacaggtgcagcgctttgtcgttgtctttcgcgtttttgatggcgtcaaggaacgtttgattgcgttcgaattcgccttcgcggatggcaacgttcacacgtgttaagctttggtacacaatacgtcctgcgccgatattcaaatgaccgacttcagagttccccatctgtccttcaggcagtccgactgcttcgcctgatgccgtcagcgtctgatgagggtattggttccaataacggtcgaaattcggttttttcgcttgtgcgactgcgtttccgactgtttcattgcgtaatccgaacccatcaagaatgatgagtgcagctggttttttactcatattgaccttcctccaataattgaacgaatgactgcggttcaaggcttgcgccgccgaccaaagcaccgtcaatatcggactctgccatatattctttaatatttgcaggttttacgctgccgccgtattgaatgcggagcttgtcagcagtttcctggctgaagctttcagcaacgactttacggatatgcgcgcagacgtcgttagcatctttcgctgtagaagatttgcctgttccgattgcccagattggctcgtacgcaataacggaagcggcaacttgctcttcagaaagacccgcaagaccttttttcacttgatcggcaacaagatcatttgtttttccggcttcgcgctcttcaagcgtttcacctacgcaaatgatcggcacaatgccgtgtttgaaagcggcatgcgcttttttgttaactgtttcatcagtttcagcgaacatttcacggcgctcagagtggccgatgacgcagtaatccacgccaaggtctttcagagcgaccgggcttatttcacctgtgaacgcaccgttttcttcaaaatgcatgttttgggcgccgactttcaggtcagttcctttaacagcagaagtcagcttttctaagaaaagagctggtgcgcaaacaacggcttccgctttgtctgctgctggaatggaagatttcacttcttcaacgaagctgacagcctcgccgagtgttttgttcattttccagttaccggctataattggttttctcatctgttccacttccttatagcagtttttatttatcgttcagcgcagctacacctggaagctctttgccttccatgaattcaagggatgcgccgccgcctgttgagatatggctcattttgtcagcaaggccgaatttttcaacggctgccgcagagtctcctccgccgatgacagagtatgtatcgtttgcctctgccaatgcttcagccactgcttttgtgccttgagcgaacaagtcgatttcgaatacgcccatcggtccgttccatacgacaagtttgctgtttttgataacttcagcgtacgtttcgcgggttttcgttccgatgtcgatcgcttctaaatcacttgggatctcagagatcggcacgatttggacgtttgcatcgttagagaaatcatcagcaacgagaacgtcttccggcatatagaatttaacgcctttttctttcgcgcggtccatgaatgattttgcaagttcgattttatcttcttcaagaagagatttaccgacttcataaccaagcgcttttacgaatgtgtaagcaagacctccgccgatgatcaggttgtccactttatcaagcagactttcaattacgccgattttgtcttttactttcgcgccgccgatgattgccgtaaacgggcgctcaggatttgtcacggctttgccgagaacgtcaagctctttttccatcaggaatcctgcaaccgccggcagatgctcggcaattccggctgtagatgcgtgagcacggtgggcagcaccgaatgcgtcattgacatatacatccgcaagttcagcaaatgctttagcaagctcaggattgtttttctcttcaccagggtagaaacgtacgttttccaatacaagaacgtctccgtccttcatatcagaaatttgtgcttttacagcatcgccgtaggcttcatccgcttttttcacttctttgccgaacagttcgcctaagcgtgcagcgacaggagttaaacgaagctcctcaaccacttcgcctttcgggcggcctaagtggctcgcaagaaggactttcgcgccctggtctgcaaggtgtttgattgttggaagcgcagcgcggatacgagtatcgtctgttacttccccgtctttcattggaacgttaaagtcaacgcggcagaatacgactttgccttttacgtcgatgtcttttactgtttttttattcatgccttaggagatcctccttcaaaatggtttgcatagcacgaaaaacgtgaaacgtgaaaccgcctcatgatgcttccgccgcggggcagattgcagcttccgggcacggggcagatcgtcttctgagccagggcaggcggctcagaaaacgaaagtgccgcggaaacttcaaaacgcggacgttctgcagcaatccggcgctttctgaaagccggttctcatggaaaaagggaaagggagtccgtccccttcccttgtccgctttcattatagcgtttctgtccgaaagaaccaagtccggccctttccgggagctatgaattaaagaccttgttttgcgatgtaagctgcaaggtcaacaacgcggttagagtagccgctttcgttatcgtaccaagagattacttttaccatgctgccttccataaccattgtagaaagagcatcgattgtagaagagttagcattgccgttgtagtctccggatactaatggctcttcgctgtagccaaggattcctttaagatcgccttcagccgcttctttaagagctgcgtttacgtcttcagccgttacgtctttgttcagttcagcaactaggtcaacaagagaaacgtttggagtcggcacacgcatagctccgccgttcagtttgcctttcagttcaggaagaacaagggaaactgctttagcagcaccagttgatgtaggaatgatgttttcagctgctgcacgcgcacgacggtagtctttgtgcggaagatcaagaatttgctgatcgtttgtgtaagagtgaacagttgtcatcataccgcgtttgatgccgaatttgtcgttaagtacttttgcaaacggcgcaaggcagtttgttgtgcaagatgcgttagagataacatggtggttagccgcatcgtatttgtcttcgttaacacccataacgattgtgatatcttcttcgttagcaggtgcagagatgataacttttttcgcgcctgcttctaagtgtttcgcagcgtctgcgcgttttgtgaagaaaccagtagattcaactacgatttcaacgccttgtttgccccagctgagtttcgcaggatcgcgctcagcagaaacttcgattgttttgccgttaacaacaaggttgctgccgtcaactttaacttctgcatctaattttccgtgtacggaatcatattgtaaaagatgagcaagcatgttagcgtctgttaaatcgttaaccgctactacctcaacttcaggattgtttaatgctgcgcggaatacgttacgtccaatacgaccaaaaccgttaataccgacttttactgccatgattatttcctcctttaaataagtgagagatatttatattgagggactgttatcccttaataacttctttgcggctccttcgtccgtgacgagaaccgtgtttcgctgctttttaaaataagcttcgattgcttctgcttttgatgatccgcccgctactgcgataatgtcgggaatggcatcgaggtcatcaagctgcattccgactgaatgcaccttgtgaacgacttctccgtccgcattaaagtagtagccgaatgcctctgtcaccgcatgattgtcatctattttcttcaaatcttccaaaggcgtgtttcttcgctccgccattgttctagcttcgccgattccgtgaacgagcatactcgctgatttaatcgtgtgaagcacctcttttacggaaggctcttcaataatagatgagtaggcgccttgtgacagctgtccgggaacgaacaaaagccggtaagtgcctgaagccttttccgccatatgcgcgcatatggtgttcgcctggtttttcacatcttcgcctaaaccgcctcttgcgggcacaaacaggagctcgcggttttttgaatccggcgtcatcatatcggcgacggcttcaattgtcgtaccgccggttacagcgacgatatttttgcctgaaaatctctttttcatacatgcaacggccgctctccctaattcttttttgacccaaggagattggtcgctgtctccggaaacgataatggcgtctttcagattaagccgctcttttaatgtcttttccaaaagcgtcaaccctaaaacatccttcatcgtatcttccagaatcgaaagcagtgaatagccctcttccgtcattgtcatgccgtttgttttaatatcgatgagattctgttctttcaaaaactgaacctcgcttctgagaacgcgctcggtcaatccgaggctggctgcaagacttctgcggccgatcggttcggtaagcctgatatactgcaagatttcaaatcttttctgcatcacaagcaaaagatcaggcaataattttttttgagcttgtattaactggttcatgactcaaacgttccttcctattcatactggacagaaaatgtcccgctatgacaaaaaacgtcccatcatagccaaaaaaaattatgtctgctttctttaattattttaacaggatgactttgttaattcaactgttaaaggtcaattcctcgacattcttcgcaggattttccagtatctccttgatacagtcattatatacagaaacggaatgaaggtgacagacaaaagcccgccggagcggacttttgtcgtaaaacgctttcattttatccaaagtttttctatttcttctaatgatttatttttcgtctcaggacagatcgtcacgacaaacaagaaacagagaatattaatgacggcgaatatccagaaggtgtacgcgagccctaacccgctgatcatcatcggcacgaactggccgatcgcccagttggccccccataagaatatcgtcgcaataccggcggcgcgtgcgcggaggtgattcggaaagatctccgaaatcatgatccacgtaatcggcccgaccgatacgcagaaagcggcgacgaatcccaatatgatgacgactaaagccggaccgctcgccagctgaaaataaaaggatgctccgattaagatcatgaacagcgccataaaggcagatccgacccccatcagctttttccggcccaccttatcgactaaaagaaccgcgataatggtgaaaatcacttcaacgacaccgacgatgcatgtcgtgataaaccccgcattctgtccgaagcccatcattttgaaaatttccggcccgtaatacgtaattgcgttcataccgataacctgattgaataaagccagcagaatcccgatcacaagcgcttttctcagccccggcttaaacagctgagacaatgaccccattttttctaattgtaaagacgtttcgatttgtttgatttcttctttcgcggtctgctcgccgttaatgcgcgtcagcacggcgagggcttcattccggcgccccgctttcgcaagccagcgcggactttccggcacgataagcagcacgataaaaaagatgacggacggaatcatgccgtaagcgagcatccaccgccagccggtgtgcactccccattcatacgagccggactgctggacggcgaggttaataaaataagtgccggatatccctaatatcgtaaacagctgatacagtgaagacagactgccgcgtatggccggcggagcggcttcggtaatatacgtgacagaaagcgaggagcccatgccgattcccagaccgccgatgactctggcgatcactaaggaagacacactttgagaaagcgcagagacaaccgctgacaccgcaaacaacagcgccgctgccatcaaaatctttctccgtccgaaacggtcactcaaaaatccggaaatcccgacgccgaaaacaccgccgatcataatgctcgaaatcacgagcccttccataaaaggacttaagcggtacaaatctttcaggaaaccgatggcgccggaaatcaccgccgtgtcataaccgtacaaaagccctcccagtccggccgcgcatgagatgagaatgacaaaccacttggaatgctgccgagtgacaggtacatttgagccaattggtgccgggtgattcttcatgaattttaccctcccgcgaataatagaataaaaacgcttacaaatctgagtgcggcgcttgatgttgctttgttttcttcagaaccgccacatttgtacgtacttataaagaattttatctaaaaataaggaaaattagtacgtacaaataaagaataagcagtttttcataatctgtcaattatttttacagcttgatgaaagggcttactatgttatactgaaatttgtccgtatacattttggaggaattgatatgctaccgaaatatgctcaagtaaaagaagaaatttgttcatggctgaatcaaggaaaaatacagccggacgaaaagctgcctacggaaaatgagctgatgcagcagttcggcgtcagccgccataccatcagaaaggcgatcggagatttggtctcgcaggggctgctgtacagcgttcagggcggaggcaccttcgtcgcttcacgcacggcgaaatcagccatgcattcaaacaaaacgatcggcgtcattacaacgtacatatcagactatattttcccgagcatcatcaggggaatcgaatcttatttaagcgaacagggctattccatgctgctgacgagcaccaacaacaatacagaaagtgaacggcgcggtcttgaaaacctgctgtccaaaaatatagacgggctgattgtcgagcctacgaaaagcgcgctgcagacgcccaacatcggctactatctcaatctggagaaaaacggcattccgtttgccatgattaacgcctcttatgcggagctggccgcaccaagcttttccgtcaatgatgtcaaaggcggcatgatggcttgcgaatacgtcatgtccctcggccacacgcacattatgggaatctttaaagcggatgacacgcagggcgtcaaacggatgaacggctatctccaggcgcaccgggagcgcgggattttcccgtctccggacatgatcgtcacttacacgactgaagaaaaagaaaccgtgcttctccaaaaaattaagcatacccttgagcaaaacagcgggtcacacccgacggccattctttgctacaatgacgaaattgcgctgaagacgattaatcttctcagggaattcgggttaaaggtgcctgatgacgtatcggtcatgggctatgacgattcacatttcgcccagatttccgaggtgaagctcacctctgtcaagcatccgaaatccattatggggaaagcggcggcaaaatacgtcatcgactgcttagagcataaaaaaccgaagaaggatgacgtcgtgtatgaaccggaactcgttatccggaattcagtcaggcggatcggcgaataaaaatgggcagatacaatagtatctgcccatcagtcattaaattgaaaactaagctgaaaatcatgaggtggaagaacatcatctatattttctttattaaaatgctttaaaatataataaaataacgaatctgaaatatatagtcttttatcatagtatgtaaagacctttggaaagatatcctttttggattgcaattcatcgaagtgattaagcacagaggtcagcgcaccatgatttattgactttttctcatggattcggtgaatattctcatataaatactgaaaagaaaatcctctcctcgctatatctggatcagacgttaacacaattttcattatataatagtataacttcagcttcgcttttctttctccatctgcaatgtcttgaatttttgtcagatattcctcgcttactcttttataatacagagcattacattccttagctaattcaacactgtcaagaacaatgtaattctgacttctctttcttatcccactttcacgacaatagtcaaaaagaagttgttgatatacagcaactatttggctagatgcctctataaaataatttgttacattttcactaatgtctatgttcagctctttacagcctctactctttatattcattaaatctgtagtagaccatttagtagcatcaatataatcaattctttgagataattctccattaaatttttcaaaatagccatttataattttcgtcccaattataatgaatcttaagccgctttgataaaacattttcaggtcaaaagccaacagatattgatcgactaaatttaaataatgaaagtcatccagtacgataaactgaatacctttttccttcagtgattcagccactctgacacttacggtcttgggaagatccatttttcctgattcacttaataactctttttcagatgaatctccggtcactttcgcttttaaaaattgaaatagatttgcctctacttgactatcaatttttgagcacttttcaatacttttggagaagttatcagatatctccacaccagatttgtataaaatttgtgtataaatatcagctaaatcaactcccttcgtacagtctatcactatagtgttttcagctttggttacatatttttttcttaataatgtttttcctacttttgtttcaccatatattacgatgtgatgatccgtaagttcaattttatcttggtaatcctcatcaatttgttgtctatcaacataactttttaaaacattccgcgatataccaaaaacatctttcaaagaaacatccaaatttttattccctccctatatttcaagaaaatttttctattaaataatatcataatagtatgaaatttcgtattattgcacaaaaacaggcagcacactatatattatgtgctgcctgtttttcatctttttaattcggcgatgatctcaaatgatctcattctgtcggcatgctcaaagctttctgaattcaccatgatttcatccgcctgtgttgtccggatgaagctttccagcttttccttcacacgctccggtccgccgacgatcgttgaactgagctgttcattgaccatcgctttttcatacggcgaccagatttgatccatgtcttcaacaggaggcttcagctggttcggcgtgccgcggacgaggtctaaaaatctttgataatgcgatgttgccagatgctccgccttttcgtccgtatcggcggcaatgacggtgacgccgaccatcgcgtacggttgatccagtacgtctgacggacggaaggagctgcggtacagctcaagggcgggcacggtgtttttcggtgagaagtgagccgcaaaggcgaacggaagcccgagctctcccgcaagacgcgcgctgaagccgcttgagcccaaaagccagatcggcacgtccagcccttcgcccggaatggcgcggacttgattgcgcacattgccggacggtttgaagtaatttctcaattcttcaagctgctccggaaaatcttccccgctgtttatgtttcttcgtaaggctctcgccgttaattggtcggtccccggcgcgcgtccgagccccaggtcaatccgacccggatacaacgtttcaagggttccgaattgctccgcgatcacaagtgaagaatgattcggcagcataatacccccagaaccgacgcggatttttttcgtgcctccggcgatgtggccgatcagcaccgccgttgccgagctggcaactccttctatattatgatgctccgcaagccaatagcggttatagccccactcctcggcgcggcgcgctaaatccatgctgttgcggaacgattcagcaaccgttcccccctgtacgaccggcgataaattcaatacggaaaacgcagtatctttcaatgtatgttcagccatcgttttctcctttatggtttagtgtaagcagatcttaaacaaggtctctaccacacaccttaccacagcttttcccgtgagttaaacaatttgattcgatgatcttcgaacaatcagtcagcggcggttttcttacggatgaacagctcctcggcgacatcaataaaaagcttggcggcaagtgatgcgtctttcatggaaggaaccgccagctgtacctccctgaatacatccggcgtaaactctttaatcaccacttcttccgggaggggattgccggccatggacatatcggataagattgccatgcccaacccctcccgcaccatattgatggacgtgctgacattaaacacggtaaaggcggcgcaaagttcggcaccggcttgtttaaacaggcctgcaaaaggtgacgtgtaaccgccttcgcaaaccaccatcggttcaccgtccagatcttttatcgttacggtggagcgtgaggcgagaggatgatctttatgcataaccgctgccattttgtcttttttcagcagaaagtaatccatatcctctgtcgggaacagcagaatgcccgcgtcaatcatccgggattgcagccattcttttacttcgtccgccgttccttcatgcagtaccagctcaagcttcggataccgatttttaaacacgctgatcagctttggaatgaaataagcggaagcggccggaaatgtgccgatgtgaatcgttccctgttcaagccctctttccgcggccgccagctgctcggctttttctatccctttgagcacctctctgatatgaacgagaatttttccgcccgtgtccgtgagccttacgccgttgcggcgctcgcggatgatcagcttgatgccgagctctgactcaagcgcagagatggcatggctgacagcgggctgcgtcatattcagcgcctgccccgcttttgtaaagcttcccgtttcagcgatttgaacaaaaacccgcagttgtgtaatcgtcataacgttttacttatgctccttataaaaaagattcattttatttatcttactgattaccgtatcatatgatggaattgttctacaaggagtgaacgacgtgaaacagctttcgaaaatacagacggctcttatgctggcgtttctagtcacggtgtggggaattaactggccgctgacaaaggccgcgcttgcctattcgccgcctcttctgtttgccggaatccgcacgctgatcggcggacttctattattaatggtggcgctgccccgttttaaaaagctgcgttttaaagaaacgtggccgatctatcttatttctgccattttaaatattactttattttacggcctgcaaacggtcggcttgaattacctgcctgccggcttattttcagccatcgtgtttttccagccggttttaatgggcgttttttcttggctgtggctcggggaatcgatgtatcctttaaaaatagccggtcttattctgggctttgccggtgtcgccgtcatcagcgcagccggtttcggaggccatatttccatcgccggcattcttttggccttaggctccgcggtcagctgggcgctcggcacggtatatgtgaaaagaacgggcggacgcgcggactctatttggatggtcgctcttcagcttctgatcggcggcgtgctgcttgtcagctccggccatttttcagaaagcttttcagcgattcaatggaaagctccgttcattctcagccttctgttcatttcggtatttgtcatcgcgctcggctggctcgccttttttacgcttgtcggttcaggggaagcaagcaaggttgcctcttacaccttcctgatcccgctcatatctattgtcgtcagctcgatatttctgcatgagccgctgaccgtcagccttttagccggactgcttctgatcgtcacaagcatttgttttgtgaatataacaccgaagaaactgaaaacacctgctctggccgcagaaaaaaaggccgttcattaaaaaaactcttgccgcggggcaagagtttttttatttattgacgtctccctttcacgagatacgcagccgtaatgaggagatagatggccgcagtgatgcatgtgatgacgatggacgtcgtcgcaattactccgattaggatggccaaaagcgcaagcaccgcgaaccatgtcgtatacgggaaccatttgacgtaataagccggctgttctgttgaatgttttcttgatttcaaatgggcgaatccgataatcagccagatgaacagcacggtatagccgagggaacccatcaaataattaaatgtctggcttcctgcgaataaagaaatcaggacgcctacatataaaaatgacgtacaagtcagaatcgcataaacgggaacctttttcttcgatagttttgaaaagattttcggcagccggccgtcagaagcctgcgtaaacaagacgcgggatgacccgtacagtcccgagttcatagacgagataatcgcaagaagaatgacggcattcataatatggtcggcacccggaattccgatcatcttaaatactatgacaaacgggctttcgggaacgctgttgacttgattccaaggaatcaggctgacgatgatgaaaaacggcagcaagtaaaaagcgacaatccgcgttaacgtgcttcggacagctttcgggatcaccttttcggggttttttgtctccgccagcgtgacgccgatgatttccgttccgccgtatgagtagatcacgacgagcatcgccgtaatgacaccccccgctccatgcgggaaaaaccctccgtgatccgttaaatgagacagccccggcgccgtgtgattgccgaatgagaaaaataatagcagaatcccgcataaaataaagatgacaatcactgtaattttaatgagcgcgagccagtactccgtctcggcaaacagtttcacagaaagcatgtttacgaccgtcaccacaatggaaatgatcaaagccaatatccatatcggacattccggcagccaatattgaatgaaaatggcggctacgaccgcctcagcggcaatattgagcacccacattttccaatagatccagtctaaaaagtatgcagcgtacgacccgagagactgctgaaccaaatcacggaacgtccttgcatgtttgtttctgacagccatttcggccagcccctgcataataaacagcagaatgattccgccgaggaggtaggccagcagcacggacggccccgcttcatcaatcgccgtgctgctgcctttaaagagcccggccccgattgcgcctccaagcgccatcatcataatgtgtctggacgacatcgtccgttttaacgtttgcttgtccttttccatctatcacacgccctctcgcaaaaagtgttcatcacataaaaaagcacgccgcctctttttagaaaagagacggcgtgcctcaggcagccgcggtaccactcttgttgatcccgaatatccggaatccagcttaaaaaccttttaacgaaggtcagccgttaggacatagggaatattccgataattccgttccgccctgccacttccgggcgagttcaaagaacaatcagtccgcgttgcaccaacccgcggctctctttttctgattggattcttttactgctcccgttcacagtgttttatgttaaatgaatctcttgagtttttattttctgaatatagtaacataatatacagtcttctattttcaaagtcaatactaatttttgccgctagttttcttatcacctatataagacattttgactgaacatgtttaaattcatatgcggggtgagccggcccctaatatagcgtaatcagcactttatttatattgttcaaacagaaattccgacgaaaggttttccacgatatatggactgagcggcaaaaagttagcagaaatatgaaaggttttactcttatgctggtatcccagcttagtaattgcatttcatttctaatcgttcaacttcaatgactccacaaggttctatacccggaagtcatattccatttattaaagctattgacatgaaaccaattccacaaattaaactcgtggagaacactagttggcgtaacacgaaacagtatagaagcatttgtggcgttacagctagtgtttttgagtgtttaaaggagagtttcaggatacaaataacaataacgagaacatcagatgtagaaagtcgaataaaaaacctatatttttacaaaaagtgataataaaaggttgatatggtacgggtttcatactttaagatgatgatgtgtcttcactgaatactaaataaacatttccaggaggcgtttcctatgcagtctagcacatcatttaacagcccagcttaccttgaaacaaatggagtaatgaaaatcgctgatataacctatagtaataacgaatggctgaacttcgacattggaggagaaggaatttttaagaaatcaggttcttatttagttccatctcttccagtagaatttcattgtcatggaatcggtcactatgattttagcaatttagatcaattagatattgaaaagatcaatacactagctgaaatagaagggattttctgtgtaccctctatttttcttcctcataatcaattagatcaatttgcagcctttatgaaagagttccatacacaaaagagaaagggacgttaccgtaatattttaggtatttcactagaaggaccattattggccagctttgcaggcacaccggaaaaagggaattgggcacccttaaaagaagaatgggaaaagatcgcttcttgcggagaatacggtcttatttatactgtactgtccccagatgctatgactgaaaactcctatctaaagaaatatatgacagaagaacatccgagtttagaatggattgtggatacacttgtggaggctggagtaaaaccggcgctgggtcacttccaaaaagcatacccggaggaaacctctgaacttataatgaaagttatagatacagcgcaaaaacgcagcaattacactggatcagatgccgttttaacagatcatttgtttaatgatatgccaaacaattttaaacacacctggagaacaccccaagaaagagtacatagattagaggggttaaaagatgctcggttagataaatggaacatagataatatcaacacacttgtcggagaagttcccggtactttgatgagagccgcgaaagaaggtttactaaccatttgtatgaattttgatagtgaacatgtagacttagaagttgcacgacgggttgtagaacttgttggctctaagggtattatagcaatgacagatcgcattgacacagattccatgtgcggccaatcactggagaaaattgaagggaataatctgtggtatcaagggaaagggtatgtagcagcagggtcttacacaattgatcggcttatgcataatattcgtgctataggttttaatgagaaagttgtatggaatatgacatcatttgtaccattaaaagcttgtcatttcctaaatgaacttgaaaacctatccatgaagcccttcagttttatagatgaaacgaaaaaaagagctcatttcaaagcgcctgccccagagctggttctgcgctaagcaaaaaagaccaccataaagtggtctttttaagttgactttcttttcataagttttaggttcaacttatttatattggggacatctttgttattcattaagttatataataaatttgctgctgtttgtcccaactctttaataggttgatgtatcgttgaaagttctattaccttagatatcggctgattatcaaatcctataaccgccagttcttcaggtattcgtattccctgtcttttcgcttcataaatgatccccgccgcaacataatcacttcctacaaccattgccgcaggacgaggtgacttatttagcaataattttgctatttctataccattctcaatagtgtactgttcctcaaagtaccaattatcactccatttcaatccgtattcattttgaaagtgaaaaaatgatttttttctgcttatgccaacaccgctcttaggatttcctatacacagaccaatggattgatgtccttgatttcgcagatgatcaattgccattttgattcctgactcatgattaataaatatatgtgcaacctgtttgcttgcagaagcttcacaggaaacaatattgccaaacccagatatctcgtcgagtacgtgaggggggcttacacaggatcccaaaataagaccgtcaataagtttgtatttcagtctgttaaaaaactccatttcttgttcaggatcgttatttgattggtgcacaagtaaactgtaattatgtttattacactcttcgcctattccggcaatcagtttactgaaaaacggatggttgattttaggaacaatgactccgaatacatttgtcttccccctggataggttaatcgcgttgaaattcggtacataatttaattccttcatagcttttaacacagcgtcccgcttctcaggttttacataaggatgattattgagaactctggaaactgttgtccgagaaacgttcgctttctttgctatctctgtaatgtttgtcattactgttactccttcttagacagcgttatcaggattttacactgaacaacacaagggaaaataagcatttaatgaattgttttatcatggcctccatgaatatgtgcgccttcctgtcccacactatagatagaacggggcttccccatcttgtgtaatagtttgtcaaataaacctactaatatccccagacatagcagcacaatgatggttcctatcccaatcggcccctgaagaatgattgcaagcacaaaagctaaagcttcccctatcgtctttgtaatattaataccccaacctgtacgttcagtaatagccaacattaattcatcattcggtatcgaaggaaaagatgctcttaaataaatagcgattcccatagccaatatacacaaccctatcaaaaataaactccattgaagaatgacagcatctgtttttaagaacgaaagaacctttaggtttaaaaggtcaacaaaacttccaataataacaatcggaataaaaccggctagattaggaaaccgcatttttatgaggctgtttataaagataaggattcctccgacaatgaaaacccatgatccgattgtaaggccaatgagttctgataaagccacgttcagagcatcccagggggcaatcccggtattagatttaatcatacatacaacccccacggataaaataaacaatccggcaatatagattaaacaccttttcacaaaatggctcatggctgtatactccgcggtttagggtcttcttctttcgtcagaatgtaatgatgaaaagcataagatacaccacactcatcattcgataacgttttaaaagcagccaattgaataagcttcttatctgcatttcccatggctatccctattcctgctgcatgaaacataggcagatcatttaaattatcacctattgcgattgcattccgcgcatccgttccataatgttcacaaagtttatttaatgacgctcctttatctactcctgcacttgtgatttcaagattgaatgctcctgaactcgttacggcacacttcttcagttgtccaaaatattctttagctttttttaattttctttggtttggcgaaacgatcatacattttatgacataccgataatcgatagggtcaattgtacccggtatttcctctaacccgtattgatggatttgagctttaatagaattccaaaatacttcttgattaaaatgaggttcttccattactgtattgtaaagttctttttcaagctgctgaattccttgatttgatacgacaattttgtcagataagtaaagctgataatagatttcttctttatttaaccatgtgatgataggttgaattacatctgaatccataaaatgttcgaatattacctgatttcccacatcaatttgagcgccgtttgaagcaataatcggaaaatccaaatcatatttattgatgatgtgttttgcatcaaataaagctctccctgtagcgattgttacaagatgaccttgtttttgtccgagctttaaagctcttacatcttgttcctggatagttaagttctctgataacagcgtgccatctaagtcaattgcaattactttcatgtgaatttcctcctcagagtttaaaaatcattgaaagtataatgtatggtacgcgtttcagagcaattagattattatattaatttgaagtttttctccagaagctgattagacctgtgcttctcaagtgttctcctgcttaatgatccttctctggaatttcaagcgctggcaactcactagaaactgaactgtaacaggacagcttacacttatggccggcgacttgggcaccggcacttttcagagaacgatcactttttgtaaaaaccggatgtatgaagtgtcattgaggcggtgtccccgatatacttttctcttttctttcatttgcggtaaagaaaacaaaacctgattcccttatgacagaacttgctttatcataaaagtatgcgtttacattcgagtagggaggttatagcatgacccctgtgaattcaagcagcatcgggaagattcaggcggccagcaaaggtttgtcgccaaaattgagagcgattgcagaccatatcgtgaaggaaccgaaagacgtggttcacctttccatcattcagctggcggaaaaaacgaaaagctctgaagcgacgattttcaggctgtgcaaacggctcggtttttccggctatcaggatttaaaaatcgcgcttgctcaggagatcgttcaggagccggtgcagcacattcatgaagaaatgagccccgacgacgatatcgaagtcatcatccggaaagttttccgcacaaacatttccggtctgaccgatacctttcaattattagatccggccgacgttgaaaaagcggtagaaatgatccaccgcgcagacagaatcgaattttacggaaacggcggttccgggctgatcgccacagacgcgtatcacaaatttatgcgtacgggtataaattgcatcgcgcacacggattctcactttcaggcgatgtcggcgggtcttctcggtcccgaaagcgcagtcatcggcatttctcattcgggaagcaacaaggacgtgctcgacgcggtgaaaacggccaaatcgctcggcgccggcacgatcggcattacaagctaccaaaagtcgccgctcacccagatttccgacgtggtgctgtatacgtcaacaagggagacggctttcagaacggaagcaatgtccgcaaggcttgcccagctgtcggtcattgataccctgtatttcgccacggcccggctgcggcaggagaaaacgctcgccaacttgcagcaaatcagaaaaatgatcgcgcacaaacgtttgtaatcgctttttgaatatttatttttcaaaagagagaatgccgatacagcgggaattgaggcaattttatgaaaaaaattttcttcttcatcgttgatttataaaaaaattattcctataattgactttgtaagggcatacattatcaatctatcttattattcaatcagattaggcgggatatattatgaaggaaacccaagctgttatcggtctggatatcggcacgaccagtacgaaagccgttctgttcggaccaagaggcaaagtgttagccaagcattcggttcactatgatttaatacagccaaagccggcatgggccgagcaggatcctgagcacattctggaagcggttatcggaagcatcagaggcgccgtcacaaaggccggactgagccctgacaatctgcttgcaatcggcatcagcaccgccatgcactcattgatagctgtcgatcaaaacggcggcctgctgaccaaaagcatcatttgggcggacaaccgcagcgccgagcaatcaaaacggattttaaaagagatgaacggttttgatatttataaaagaacgggtacgccgattcacccgatgtctccgctttccaaaattgtgtggatgaaagaacaggacaaggagacattcgcgaaaaccgccaaattcatcagtattaaagaatatattctgcacgagtttttcggaacttatgtcgtcgattattcgatcgcttcggcaacggggctgttccgtttagatacgctttcctgggatgaagaagcgctccggattgccggaatccgggaagatcagctgtcggacatcgtgccgaccactcatcagctgcgcggccttgcgccggaaatcgctgcacggatgggcattcatgcggatacaccgtttattatcggcgcaaatgacggcgtgctcgccaaccttggagtcggcgcgatcggcaaaggcgaagtggccgttacgatcggaacaagcggagccgtgcgttcggtgacggatgcgccgattacggatgaaaaagcgcggacattctgttacgcactgactgacaagcattgggtcatcggaggcccgacgaataacggaggcattatgctgcgctggcttcgagacgaattcgcttctccggaagtcgaaacggcgaagcggctcggcattgatccgtatgatttaatgattgatatcgctgataaagtgcccgcaggctctgagggattgctgtttctgccgtttttatcaggggagcgcgcgccgttttggaatccgaatgcccgcggaacgtttttcggcatcagcctccgccataaacgggagcattttatcagagcggtgctggaaggcgtcatcatgagcgtcttttcaatcggtgtcgcactgagagatttggcgggccctgcaaaagacgtgcgggcatcgggaggatttgcgagatcgccgctttggaggcagattttgtccgatacgatgggacgggaagtcctcgttccggaaagttacgaagcctcggcgctcggagcggccgtcctcgctttgcacagccttggcgaaatggaacggatcgaggatgttcaggactggatcagaatttctcaccgccatgaaccgaacgtcaaaaacagcgaaacatatattgagctgttttacttatacgagcggctgtatgacaagctcaaagatgaatttgacgtcatcagtgaatttcagctcaaacaaagccgttaattcttctttgaaagggtgaaaaggtcatgttactgtttattgtcattgccgctattatcgttttactcttattgattacggtcgctaaattaaatccgtttatcagtcttttgattacatccatccttgtcggtttcgcaacgggcatgaatctgccggacattatcgcttcgatgaaaaccgggctcggcaatacgctgtcgctgcttgcgatcgtgctggccctcggtacgatgctcggaaaaatgatggctgaatcaggcggtgcggagcgtatcgcccacaccctgatcggccgcttcggcaaaaagaaagtgcattgggcgatgatggccgtcgcttttatcgtcggcatcccggtctttttccaggtcggcttcgtcctgctcgtgccgcttttgtttacgattgcgattgaaaccggggtttcattagtgacgatcgggattccgctccttgcgggactttccgtcgtgcacggattggttccgccccacccggcggcgatggcggctgtcggcatttatcacgccaatgtcggaaaaacgattttgttttctttaatcgtcgggattccgactgccatcatcgcggggccgctttacggaaaatggattggtaagcgcattcataaacccgttcccgaactgttgaaaaaacaatttattgaacggaatgaaaaacgcaagcttccgggattcgcaaatacattgtttacgatattggtaccggtgatcctgatgcttatggcaacgcttgccgaaattgcgcttccggaaaaaagcacgctctatgaaacttttaaatttatcggcgaccctgtcacggcgcttttgatcgccacggtttactcctttttcagccttggtttttatcagggctttgacagagaaagcattttaaaattcagcaatgactgtctgggaccgattgcttccattctgcttgtgatcggagccggcggcgcttttaacaacgtcctgattgattcaggcgtcggcacgtatatcgctgacatggcgaaacactcaagcttctctcccgttcttttaagctggacgatcgcggcggtcatccgtgtcgccacaggttcagcgactgtcgccatgatgacggcggccggcattgttgcaccgattgcatctgtcatgccgggcgtcagcagtgagcttctcgtattggcaacgggagcgggctctttgattctgtcacatgtcaatgactccggtttctggctcattaaagagtatttcggaatgacggtaaaagaaacgttcctgacatggacggcgatggaaacgattatttctgtcagtgcgatttgttttatcatgatcattaacgcgtttatataaaaacaaaccccggccgcaaaccggggtttgttttttatcggtcattcacgaggatataagcggctttaacgggtccgtggacgccgacaaccaaatccatttcgatatcggccgagttgctcggtccagtaatatagttgatgcaggaaggaacggtgacgccgtctctgatctgctgtttcagtatatcgctggcctgtgtcattctcggcacaatggaagatttcgggatgatggcgatataggtggtcggaagcaggctgacagaacggccggcatgctctgacgcatacaaaacgacggtggctgattccgcaagcgtgatctcgctgaatgtaatgcccacattcgcttgttccgctttttcaatatttttcgctccttgttccgcgtcccattcccaaacgggaatcccttcatccggccactcttctgtcataagggtctgcaagccgtacgtttcaaagcggctgtccttcggaatgatgacaggccctccttcaaagcggttcacctgcgtgcgcaaagcgtcgtaaagcccggctgcatccgtttcgatcagttcggtatgaatgttgacgcagtggtctttcagcatcgtgacaagatcgtcttccgtacagcccgcatgcgtttgatattgaggctgatacttccattcaggcagggacacgcctgatttcctgcgctctctgcccagacgttcggcgatccggtttaaaaaggattcctgatgtgtaaccgtccctttcatcatcattcttcccccttttgtttttcccggtctttaaaccaatctctgaatctcgatttatgcggcgccgggaagtcccgtattgccgtccattcttttaacggccccggcccttttgatattttgtcatcttccgtaaacggcgtcatggcggcaggcgcccatttcgatcccattttataaagggacggggatgacgagccgagcccgaaggctttcatcgccagtttttcgctgatcggcgctttgccctctttttccacaatgttctgccgatgcttgagcagcagctcgtgcagcggaattttaacgggacatgcttccgtacaggccgcgcataaggaagatgcgtacgggagctccttgtattcgtcatatccgccgagaagaggcgataagacggcgccgatcggacccgaatagatggacccgtacgagtgtccgccgacatgccggtacacgggacagacgttgatgcaggcggcgcagcggatacattgcagcaccgattgaaattccgtgccgagtatgcgggaacgcccgttgtccacaaccacgaggtggaattcctcaggcccgtcagcttctccttgctgacgaggtcccgtcagcgccgtaatgtaacttgtaagccgctggccgaccgcgcttctcgtcagcatgctgacaagcacttcaaactcagaaaatgacggaacgatccgctccattcccatcacggtgatctgcgtcttcggcagcgcggacacaaggcggccgtttccttcattcgtcacgagactgaccgaaccggtatccgcgattgcaaagttgcagcctgtaatgccgacatccgcttcgagaaattttttccggagaacgctgcgcgcgtgcatgacgagctcttccggtttttccgtctgtttgtattcgagtctctctttaaacacgtcacggatctgctctttgtttttgtgaagagcgggagcaacgatatgtgacggcggatcgtgatcgtcaatctggagaatgtattcgccgagatccgtttctgtgacttcacagccctctgcctcaagcacttcgttcatattgatttcttctgtcaccatggatttggattttacgatttttttggcgtttttctgccggatgacatcgcggatataggaggacgcttcttccgccgtttcagcgaaaaagacgtgtccgcctctgttggcgacattttcggcgagctgttccaaatagaaatcaagattgtccagcacatgctgtctgatttcttccgcatgggaacgccaatcctcccagtttcccaattcttcggccgcctgaagccttcttatcctgagccgttcctgcgctccggagacggctcctctcataaactcattatctattccttctgatacccgctctttaaaagcggcggtaccgattttcatcgccatgattttccccccttgttgtttctcgtgttatctgctgttcagcacttcggcgatgtgcatgactttgacgtttttatccttacggtcaagacgcccgccgatattcatcagacagccgcaatccgccccgatcagcacttcggcctccgtgtcttccacgcaggcgaccttctcatccaccatttgttcagagatttgcgccattttcacagaaaacgttcctccgaatccgcagcattggtgctttccgggaagcgcggtcagctcgagccccttgacatggcgcaaaagcttcatcggctcctccgacacgccgagcagcctcgtcatgtggcatgatgtatggactgtcgcttttttatgcagcaccgccccgacatcctccaccccgagaacgttgacgataaaatccgttaactcatatgttttgtccgcaagctgctgcgcttttgccgcccacttcggatcgtcctgaaacagatgcggatattcacggaacatcgtcgtacaggaacctgacggactgacgacgtactccgcttcttcaaacgcggcaatcatccgcttcatcgcttttttcgcatccgtcacatacccgctgttgtatgcgggctgcccgcagcaaatctgcccctcgggaaaatccacctcacacccgagccgttccagcacctcaaccgtcgcctttccgacattggtctggaacatatccacaaggcacgtgacaaataatgagactttcatgatgaacccctctttcatcctcaatatgtgatccggtcatctgatgacctgtttttgggaaagctctatgaatatcctacactattctgaatatggattggaaggtttttctgaaaaatcctttcgtccgatgcgctgaaggggacaaaaaaaagagaagcccgaaagctcctcaagctgctctacatcccgttttccagcagacgtcccagtttttgcacaccctcttttatcgcggctttaccggcataactgaacgacaggcgaagatattccgcaccgtcttcctgatgcagaaaaaaatatttaccggggacataggaaacgccgtgagaaagagccctcgccagcattgcggatgtatccgctcccggcgctttcacccatacaaagtaaccgccttcaggcacgtgccaggatgcggattccggaagatatcgcgctgatgcggcgagcaaaacgtcacgtttgctttgatatgcttcccgcaaggcggtgagccgtttttcaacattcgtttgttccagatagacggcggtcaccgcttgggaaaacgggtggcctaagtctttttttaaccatgacaatgccgtgatgaatgcggcgtcccctgcaatccagccgatcctcatacccggggcgatgacttttgataatgaaccggcgtacagcacccggccgttttgatccatggctttcaagggcggcggaatatcggtgaatccgagctcgccgtatgcaccatcctccaagatgagaaaatcatacgtttcggcaagctgaagcaggcgggttctccgcttcgctgacattacggttcccgcaggattctgaaaagcgggtatcgtgtagagaagacggggaagcagaagcccttttcgttttctttcctcaagcatgaacgctaatgtttctgtttgcaggccctcttgatctgtcggaatgctcatgatatgcggtgtataatttttaaaaatctcgagcgcttccatgtagaccggagcttcaacggcagcggcggtttgttcatcgaggaaaacccgtgcagccagatctatcgcctgacaggcgcctgacgtcacgagcagctcatcgtcccgacagtgaatgccgcggatggctaaccgttcttgaatctgcttttttaaaacggccgtcctcgggcttcccatataatgcagcggcagatcgcgctcctcatccagaaggcgggcggcggcttctttcagttccttatcaggaacgagggcgggatcgggatagccggaatgcagggggatgcacgctttcggaactgccggcatccattcccctggaggatcgtttgtcagagctttctttacatggtcagaaaaaaaagattcggcctgcatgtgatgttatcccctttcacaagtcagcttctatacattttcttcaaaataagcccccagcacgtcttccacattcgtcaggtgcgcggtcatcgcggcttccgcttcatccgcgtctttggcggcgacggcactgtaaatgcgttcatgctcttcatacaatcgctgcacgctcgttcttttagaaaacagccaaatttttctcgtttctctcatcgtttccaaaaggagcgcggagacatgattcatgagatgcttgagcagcccgttttgtgatgcttccgccagcgccatgtgaaaggagaaatccgctttttcgcccaattcttcgtctccgtcaatgtctttcatctccaggagagcctggcggattttttgtaaatcgtcttcggtgcgtttttcagcggccatggcggcgacgccgagttcaagcagctttctgacttcgagcagctgtttgacgtcctcttttttcatcaagagggcggaagaaagcggctgggaaacatgagacggctcaaattctcttatgtatgtgccttctccctgcttcatgtcgacgagccccatcgctttcaaagccgacagcgcttctctgaccgccgagcggctgacctgaaaactctcagaaagcgcctgaacggaatcaagcttttcacccggcttaagctcgcccgcttttatcttctccagcaatgcgtcagcgacttcctcgtagatttttttcgttttaatttgtttatatttcaacgcgatcaccccgtcacttgtgaatcttgatgtttatcgtctattatacttctttttttgtattgccgacaggttcagacaatttgttcaagaaaagtattgtactttcaaaactttcaaaatataatgctaattaacccggtcatcagatgaccttatcataaaaagtaatcgcttacatgacataaggaggggttttttagggatgcaatggacacaggggtacgctcctttagggggaaatttgcttttatcggcagcttgcgcgctcgtgccgattatcttctttttttgggcgcttgcggtgaaacggatgaaggggtacatcgcggggcttttaacgttagccgtttcacttttaatcgctgtatttgtttacggcatgccggcggaaaaagcggtgatgtccgcttctcagggagcggtatacgggctgcttccgatcggctggattatcgtcacatcggtctttctgtataaaatcaccgtgaaaacaggacagtttgagattatccggagttcggtgctctcaattacagatgaccggcgtttgcaggcgctgctcatcgccttttcattcggggcgtttttagaaggcgccgccggtttcggcgctcccgtcgcgatctcggccgctttgctcgtcggacttggttttcagccgctgtatgcggcgggaatttgcctgattgccaatacggcgcccgttgccttcggcgcgatcggcattccgattaccgccgtcgaaggtccgaccgggataccggcaatggaaatttctcaaatggtcggccggcagcttccgtttttatccgtctttattccgctgtacttaatcattttgatgagcgggtttaaaaaggcttttgagatatggccggccattcttgtttccggcatctcctttgcggccgtgcagtacgcaagctcgaattttttagggcctgagcttccggatgtgctgtcggcgctagtttccatggccgcgctcgctctgtttttgaaattttggaaaccgaaaacggcctttcgtttcgcggcagaacgggaatcagcagcggccgctgaccggacgcagatcaagtacgggggcgccgcggtgtttaaagcgtggtctcctttccttcttctgacggccatgatatccgtctgggggattcccggcgtgaaggctgccttaaccggtcattatgaaggaacgtcaatgtggctttcctggctgaatgcagccgggcgtgcattgaccttcacgcctcccgtcccatttgtaaatcagcagattcttcaggcggacggcacgccgattgaagccgtgtacaaacttgagcttttcggttcagcggggacggcgattctgattgccgccgtcatctccaagttcgccctcggcatgtcgtggaagacatggggcgaagcgtttatagaaacggtgaaagagttaacgcttccggtcgtgaccattgtttctgttgtcggctttgcttatgtgacgaatgcttccggcatgagcacgacactcggtcttgcgcttgccatgacgggcgcgatgtttacctttttttcgccggtgctcggctggctcggcgtatttattaccggctctgatacgtcggccaatctgttgttcggcggattgcaaaaggtgacggcgctctctgtcgggatggacccggttctctccgttgccgccaattcatcaggcggtgtcaccggaaaaatgatttctccgcaatccattgcggttgcctgtgccgctgtcggtctggcgggcaaggaggccgaccttttccgttttacgattaagcacagtctgtttttgcttctgctcgtctgtctcattacatttttacagcatcatctgttttcatggatgatcccgtaacacggagaacctccccggggtttggctcggggaggtttcagctgtaccgttttctcgccgatgacggcggaatatttaattggtcacggtatttggcgacggtgcgccttgagattcggatgtcatattgttcatgcagcagatcggcaagcttttgatctgaaaaaggtttctttttatcttctttaccgaccaatgcctccagatgcgcttttacggcataattggaggcgccgccgtcccccgacgattcagctttcgccgagaaaaatgttttcatttcatacagtccgtacggcgtctgaacgtacttccctttgatggcccggctgatcgttgattcgtggagctccagcgtttccgccacctctcttaaggtcagcggctgcattccgctttttcctgtgagaaaaaaggattcctgccgttcagtcaggacgccgataattctcgtgatcgtttgttttctttgcgacaaagcccggttcagccagcgccattcctgatattttgccgacagataatttttcgtgtcacggcacccggcagctgacaagagcggctgataatgggtatgaagctggatatcaggaaacgaacggctgttgagccgcgcttgaatgatgccgtttttcactgtgatgaaaatatccggttccacgtaaaaacccggctcctcatgcgcataacggagccccggcctcggatcaagggcgctgatcatgtcagcgatgtcctgaatgtctttaagcggaatgcccgtttccagtgtaagcgctttccagttctttcttgcaaatagctcaaaataggcgtcggcaatccattccgcctgttcgttccgctcgggaagacggcggagctgaagaaggatgcattcctgcaaagaccgggcgccgattcccgcgggctcaagggattgaagctttttcagaaccgcttccgtctcctcttgtgaagcggatacatggtcggcggcagcttgtatgtcctcttttaaatatccgtttgagtccaatgaatgtatcatataattgaaaatctttttctcatcatcggacagcttcatatctaaggcttgctgtttgagcgaatcctgcagcgttttgcgggtaagtctgatctgctggcttccgtcccgttctttcatcctgtttttacttgttttatggtaagatagtggcggcgtgtctgtttcctttcgttcaatcagagggttttccagtgagagctcatcaatatatccggccagttccgcggaattgtatccgagtaatgtgatagcctgtttaagctcttgcgttaattgaggctttaacatttgtgtttgctgaagtttgatatccatcatgctcactccccttttttcattgtacatgattggtttcataccgtatatacttattaaaaggagttgctttatagatgtcagaacttttttctgttccttattttattgaaaactttacacagcacattgaaatgaatccgaatgaagaccgaattcatgcgatgaacagctattaccgctccgtcgtctcaacccttgttcaggatcagctgacgaaaaactcggttgtgctcaaaagaattcagcatttggatgaagcgtacaacaaagtaaaacgcggagaaacaaaataaaccttccgctcattcaaagcggaaggttttccttcgtgccggcggtttccccgatcagacggacatccggcgcttcgtgcatccaggtgtgataatagttggcatttttcccgtatgaattatcaatgacggtattcggtttcccgagaagcgaggacagaatgtggccgtgaagccttgacgtttccaccgattcgtacctgctgaaaaacaggaccgcttttttcgttaagaaatcggaatagcgtttccaaaaccgcgcaatcggcagcgggtttcccgcttttttattcaaaacattcagcgtttggaaaaaagcgattcccctgcggtcgcttgctgacagcacatcctgccagtcgcagcttttaacggaagaattgttttgcagcttcggattgatttccccatccgtgcggataaaatgaagcctgccgcgtgacggagccgctgacgccgccatcggatacagctgatgggccatgtcaggcataagcccgatatgattcgccgaaaaaaagcatttcgcggtctcgtatgacacatgatctctcgtaaacaggtggagatccttgtgctccgcaaaaagcgccgatgtcttctcaagccgtgtctcatcctgataatagatggattgcggcaggatgacgatcctgttttccggaaaggatttgacgattttttccctgaacgtctgatagtatggatagagatccccgaaatttccgccaccctgacagacgatgatcgtctttttgtccgcccggcgcccgaatggaaaattgtcgggattccagcgctgtttcacgcggatgccgtgcgctttaaaaaacgcctccgtccctttcattatcaataaatcccctacatttccgtagaggggatagtcggcatatatgatgtcagattgcggcggtataacgctgagcagacccgtcagcgtctcttttaatcggctcataacatggcggctgtccatgttttctcccctttcgtttcaaacaattgcgcaagtgcgtcaatgacgcgctgctgctcctcagaagacaagtcagacccggacggcagacagatgccccggctgaaaaggttctcagagacacgctcatgttcgctgtgaggataaaagacggaagatgagaaaagcggctgcgtatgcagcggtttccacagcggccgggcctcaatgttctgttccgcaagacaggcgacggcttcttccggcgtcacgccgttatcaagcgtcagagccgtcagccagcggtttgaaaccgttccttcaagctccggcatcatgcggatgcccggatacgtttccagcgcttcccgatacctgtgaaagatttctctcctcgcccggacgcgatcttcgagcacttccagctgcgatatccccacgcccgcgagaatgttgctgagcctgtagttatacccgagctcgctgtgctggtaatgaacggcggcatctctcgcctgggacgcaagaaacctcgctttttcaatcgcggcctcatcgtcagacacgagcatgccgcctcccgatgttgtaatgattttgttgccgttaaaggaataaatgccgaaacggccgaacgtgccgctctgcctgcctttatatgttgatcctaaggactcggcagcgtcttcaatcagacagacgccgtatgcgtcacaaaggctcattaattcatccattttcgcgctttggccgtaaagattgacggcgatcaccgctttcgggagtctgccgcgccgctttgcatcccgcagcgcccgctcaagcgcatcgggcgacatattccacgtctcccattccgaatcaataaaaacgggctcagcctgctcatacacaatcggattcgccgtggcgacaaacgtaaaggaaggacaaaatacaacgtctccttttttcacacccgcaagcctcagggcaagatggatggcggccgttcccgagcttacggccgccgcgcttttcactcccgcatattccgcgagccgcgcttcaaacgaattgacgagcggaccgagcggggcaatccaattggaacggaaggcttctgcgatgtattcctgttcttttccgctcatatgaggcggagacaaataaatccgtttgtttgtttgcatgaaatcatcctttttcattatggataggggagatgacgcgggccggaacgccgaccgccgtcacatggccgggaatccggctgatgaccgcagcccccgcgccgataacggaccaagggccgatatcaatctgcggtataacggacgcgccgattccgatgtgcgttccttccccgactttcactccgccggcaagcgccgcgcgcggtgaaagatggacgtaatctccgatggcattgtcatgatcggcaaccgcccccgtattgatgatgcaatgggcgccgatgtcagcgcccgcctgaatgacggcgcccgccatcacaaccgttccgtgtccgacggaagccgtttcactgacgatcgccccggggtgaatgagtgcggcataatcgtcatcttcaagcccaagcgtttcagcgaactgctttctgacgccgttgcggccgatgcatatcgtgaacacggcttcggggacgagtttccgaagcatgggcacgtcttccgtccggcccgtatataaaccgttccgaacggcaaaaccgctgaatccgtcatccaatacgcccgcaagctccatatcggaacgggcctgcacgatttccttcacgacttttccgtgtccgccgtttccgatcagcacgacctttttcacgatgacatatctccgctgcctgtgaagcgctttgccgtcacatggccggcttgatgtatgccttctgacacgagaacttttttcactgttaaaagcagaatctttaagtcgagaagaaatgtgcggttgtcgacgtaccacacgtcgagcttgaatttttcctcccatgaaatcgcgtttctcccgttaatctgcgcccagcccgtaatccccggcttcacctcgtgacgccgcgcctgctccgccgtgtaaagcggcagataatccatcagcaaagggcgggggccgacaagactgatatctcctttgagcacattaaaaagctggggaagctcatcgatgctcagttttctgatcagccttcccgttttggtcagacgaagatgatccggaagcagcacaccgttttcatcacgcgcatccgtcatcgttctgagtttatacaacgtaaacggacgcccgttatgccccggtctcgtctgtttaaacaataccggagacccgatggcgcatctgacggctgccatggcgaagagaaggatgacgctcgcgccgcacaataacaacaccgcggccgctatatcaaatacacgtttcgccttcaaatctgaacagctcctttcacttttcggcatttctgtaaagcaagccgcctttcttctttcgtacaaatgaagaaaaaagcgaatgcggcatagctcatgcatacggcaagccccgcggcgatcaggccggcccagctgtcaagcggtgaaaacagccggataccccggcagacagcccaggcaaatacggccgccgccaacgggccgaacatgcctttgtaaaacgcggttttctgaaaaccggtaatatgcgaaacatacagcggcgtgaagacggcatttttcaaaatgagagagactgcaccggcgatggtgatgccgtacagtccgagatgagccggaccgctgagaaccacggccaatacgacattcagtccgcctaaacataaagtaacgacggcgggcgttttttgtttattaaaagccgtccatacgtaaaaaagcggcatgacagagagactgaccgccaaatacccggcgtgaatgtataaaagcggcgccgtctgcacaaacgacgggcccagccaaatcgccagaaacggttcggcaagccctcctaataatgcggcgggaagcgcgaggagaagcccgttcatccgcacagccttattggcgtaagacaggagaccttccatatccccttttgagtaataggaagtcaaaaccggcgcaaacagtgaagcaagcgtcccggcaagacttctgagcaggagcgggaattgaataatcgccgcatagacacccgcctcagacggccccagcacgaggttggccgtcatgagatcaatctgcagaaacagcagcacgccgatctggttgacagagctccaggcaccggccgaaaacagcactttgctcgtctgtaatgacaaggttttacggctgaaagaaaaccacggaatcaatttcttaaagaagaaaaaagtcagcacggccgcacagacggctcccgctaatgccgaaagctggatctgccagattttcggcggcaggcacgtaaacagagcgagcacacacagcaccctgaccagcatttgcacggcctgaatggaacttgtgatataaagcttgttggcaaaaaacggccccgtcgcgaaccccgccataaaaaacgtcagcataaacagcacgctgccgatcacgatagacagcctcacatccgttaagagcccggccggcacattcataatcttgtcaataaaaaaagcagtcccggcgagcggcacagcgagtaatagagatatcacgacagacgcggctaaataattgcttacatacgcattggcctcatccctgttccccctgtgggcggcgacggagaaaaacctcacaacgacagagctcagcgcaacggtaataatagagaaatagttaatgatattctgtgtcagatggacaaatccaaaagcctccacacctaatgttttcacaataaagggcgtcatccacactgataaaaacaccgatagtaaaaacgccgtcacattggcgccgaaattaatggcaaatttcatgctccttccgcactgcctttctctttcgatttccgttcgaaaaacgcatgcagaagaagaggaaggcgcattttgcacagaccgagcaccacgcgctcccccgccagcagctgtttatggcggcacggcgtcctgcgcaccgccgtttttaccatgtcatacgttaagattctgccgatgtgcgccgtaatctgatgtgacggctgcggggcggcgcatgcgttggcgatcagcatcggaatctgatgcttgcacaaatatgtatcgatatcgctccggcacgcgtccgtcagcccgttttcctcataaaaagccattttcgctttatattgcttttgcagttcttgatctaagtggggcttaaacggtgtttctgtaagactttgcggattttcccggtagatatacagcccttcgtctatcactttgatacgcgcggctcggcggaacgctgccaagttaaacggagagtcctcagcaaaccggatatcttcatggaacagcagcccttgcaatgcttctttccggtatatatagcgccacacataccaaataaaccgatgttcgtgcgcacgggtcagcaatgctgtcatttcatccgctgtgaagacgcggcccggcggaagggacggcggcatatatgttcttttcttagacggcgtttctttataatagccgcaaccggcgatatccagccggttcttctccgcttcttcataaagcctttcgaacatcgtttccgtcacatagtcatcgccgtccgcaaaaccgatataacggccgcgggcggcttttattccggcattgcgggccgagctgaggccgccgttttctttatgaatcacccggattctcgcatcttctgcggcgaattgttcagcaatccggcctgaccgatccggtgaaccgtcattgacgaaaatgatttcgatgtctctcagcgtctgttttgttaaagaaaccgcgcattctttcataaaaggctctgtcttatacatcggcacgatcacgctcacaagcggcgcggtcattgggcatcaccgctgattttcgagcgcagcccggcaaaataaacactgcgcaaagaaccgccttcctcatgcttgccgctgagcatccggtttacggcggacgttacggcttcagggtctggacgttcaagcaatgtcatgttcggtatgtttttcagccattgatagccttccatcactttatgatcaaacgaacgaatgacgacacaaggcgttttcgtcagcgcacaaaaaatcatcccgtgaagcctgtcagtgacgacggcttccgcgcctttcagcgtattccaaagcgcctccagctctttttcacgtgtatggcggctgaccctccggccgaccgtcgtcgtaaaggaatgcagctcgccgtactcttttgccaaagcttctttaaccatcgttctgtcctcagccgtcagcgcactctccttatcctcccgtaaacagaggtagatcccttcccgcgggatgtgccgctcgcttttatccaaatataagaccatgtcaggctgtttgagcactgtttttccgggaaaatgacgcttcatccattgatacgtcgtctcatctctcgccattaacaaaaggtcgggatgcgcattgtacacttttcgggcgcgcttcagttccttccgtcccttttttgattcagaaaaatgagccgtcgccggaagctgaacgatccgatattgccggaatgttttgatgataaagcggcgcgtccattcctcataccggtacaaatcccccatgttcccgccgccgatgatgaataccatatcatcggggtggcgctttttgatcagcgcttttgcggatctgtatatatccttcatatccacctcgacaatgtcaaaatcgggatactcccgttcaagaaacgttttgcttgcgtaggcgatggcgtgatcgccgagattatcgtgggacgggagcagcgtcagaatgatcttttttcttgccgctgtaagccccgccccatccgctgccgttccgaaatgaaattgggacgggtatttgaccttaagcaacagccattccgcaagattgatttttaaagattgtatcgacatgtcttcaccctctgattttcattttgtactcgattgcccgctgatacgcggctgatgccagcgacacgaacggaatcagcttcagcttcgccaaaagcagaaggcatgagcgtttggcgtcaaacggcgccgttccggttttggaaaggctcaggcgaaacacgggatcagcgcatatccggctgatattcttccacttctcagaaaaccggccgccgttattccgcttccattcattcagcaggcagactgttccgtgctgaacgatgaaaaaatccagctcctgccggtattcctgtaagcagccgttttcacgcaaaaaagcctcgttcagccgatagagaacgagacctgagtcaaacagctttttctgatagctttgcacaatggaagtcaagtgaatccgataatgatagagcggctgatccacgtacgagaccgcacctgcgaaaacatgcgaccggaggctgaagtactgatcctccacgtgctccagctcatcacgaagcggaaagcgcagctgatgatgctcgatcatggttcttttgtacagcttgttccatgaaaaaccgctgactcttccttcaaataaatctttcaggtacagttgtttcgggcgccccgcgtacgctgaagcgatcgttgaaacggcggttttccccgtatccgcaaactcggccgcatattcgcaaatcacgagatcagcctgatcagccttcgctttttcatacatgcgcaggcaataatcaggttcaacccagtcgtccgcatcaataaaagcgataaattcgccgcgcgccgcctcgatccccctgttgcggaccgcgccgagcccacggttttgctgatgaatgacccggattctctcatcccgcttctgataggtttcaagaatcgccgggctttgatccgttgacccgtcattaacggccacgatttcgatattggcgagcgactgattgagcaatgaatctaagcatctttctaaataagtttccgtattatacacagcaattaataaactgaccgcgggtgtttccatataaacctccaatgtccattaccgggaaaaaatcgttctgtacggaagcacagacgaatcgaccggcataagcaagtaactgtaaagaaaataacagacaataatggcgatataaatcagcgcatttgatttttcatcaaaaattctcacaaaataagggatcaagatcatttggtacaggccgaaatatatattaaaccgggcgaaaataacatcctttgtcgccaaaagaccgaagagcaggccgagcagacagaaattcacgatgacatcaatgtcgggccagagcttccgcagccgctcccgatagcagaaagccaaaaacagcggcagaagcagcaccgcgatttttacgacgttcatcccgttcgtattggtcatcagccatttctcataatggccgtatgagctgttttccagcacgacgacaaaaagcgaaatgaacttctgatacagaaacgtcataagaagaaacaatgccgacagtccgaaaatcgcgggcgaccaggctttttttctgacgagaaaataaaccggaatcataatcagcgctgaggaatgaaaaagcgaacacagcagcacgattgacatataacgcttccagcttccgctgatcacgtagcggacggcccaaaacaaaacggccgccaccatatactgcctgatcccgttaaaggaagcgtaatagtgatacgtgcccaaaaacaaaaacacactcagctcaaacggacggccgaactcaacgagcccctttaaaataaagctgcacgtcacgaccgccacggtgaaatacatgatttgcggatctttcgtgataaaattcatgagccagatgagagccgtaaaccccggatcaacggctgcttttttcgctccgaacccgaagatctcccaaatgctgccgtaatttcccgccagcttgtacatcagcgcgtacgtctgaaaatccgtcccgactctgtagcgcaaaccggagaccaatacgagcgatagcagcggaacgatcatgacgagctgattcggccggtatccggtcgaaagcgattgatcacgcccgccgcacattttcgcgaaccatgaccaaatataaacaattcccatattgactacatatacaatcattcgttactgttcctttttccaattcatattgtaaagcttcataacagcccccgcattttctcccgcgtcatatccctgccgtctgagggtttctttaatgcgcgccccgtcaggctttgccgcctctgctgcccgtaacaccgcggatgcccattgtccgggcggttctttgaggctgagccttttgaccagcccgagcccggcatcggcttcttccgttatgccgtctgatattacgcacggcaccccggaggcctgcgcttcaacgagcgtgacgggcagcccttcataaagagacggcatgacaaatacatccagcgttttcagcaggacatgaacgcggtcttctatgccgataaaacgcacatcatcatcaagccccagcttcgccgccagattttccatatcggtgcgaagcggaccgtctccggcgagaatcagctgtaaaccgatgccccgctctttcatatcagcggccagccggagcagaaattcgtggtttttttcttctgtaaagcggccgatatggccgatcaccaaacggccgcctgcaatgccacgcttccttttttcagcttctgtgtccgcgcacccgccggcaaataagtcgagatcaatgccgttcggcaaaagatgcacgtctttttctttcccgaataagaaacggcccgcgtcttccccgcaggcgcacagtgccgtggcgtttgccgtgatcagccgtctgaaaacaaacagctgcatcccggcaagccgcgacgcccgcccccgccacgacgtactgtgcgaatggcagatccgcaccgggacgccggctaaacgagcggcaagcgcgatgaatcccgactgaaaatcggtatgggcgtgcacggcggcaaacgggcctttttcctgaatcacccgcttgacctgtttcacaaatgtaatcgggtttgtgctgccgatgctcggcacataaaaaagccgtccgccgagagcgagaatttcctcatcataagcgcacggatcgttcctatgggttaaaaaatcaaactgcaccttcgttctgtccatcttccggtacaaattcatcatcatcgtttctgcgccgcccctgttcatcccgctgaagatgtgcagcacccgcatcggtttgtcagtcatgttcggcaagcccttctttttggcggatgtccctgtttttatgataacggttcatgaccgcgggcggcgtaatggcgcggatgagcggttttgcgatatacgcgtaatgggaaagcggcagcttcagccgtctgcatgcctgaaaaacgaggaccgcgttatcaatggaatacgtaaacgatctccttttaaacgcatcactgtcctctctgactttatacagcgtttcttggagattgtacccccggaaacccgcttcaaaaaagcgcagccacaaatcgatatcctccatccgccgcgtccgcctgactgaccggtagccgccaagcgctttgtacgcttcagcccgcatcataatggtgccgtggcagaacggtgtgcctttcgccataattcccggtttcggcacgggcggcaaaagccgggcgccccttacaccgaattcgtcaaatacgagcatccccgtgcctacgacttgatagtgggcgtgcttgtttaagaaagcggcctgtttttccagtctcctcgggttggagatgtcatcaccgtcctgcctggcgatataatcccctgttgcgtatgtcagacagcggttcagcgaagcggcaagccgttgatttgtcttattttgaatcagcgtaatccggtcgccgtaatgatccgcgtaacggcgcgcaatctgatacgttccgtcagttgacgcgtcatcacacataatcagttcccaattcttataagattggctcaggatggattcaatactctccgctaaagtctcttcgcaattataaattcccatgatgacggaaattttcggttgtgctcctgcattcatacgcttttctcctttttatccatataaccggcgtaaatgtgcgccatttcctttaccgtacgtgtttcagaaaaacattccgccgtgctgcgccctttttgccccattgcttttcgcagacacggggagcggtacagcttttcaatccgatcggcaaatgccgcgctgtctccggccggcacgagaaaaccgttcacgccgtcttcgatgatctcacggtgtcccctgttgtctgcggcaacggccggcttttcggcagccattccttcaagcagattcatgccgagtccttcacggatgcttgaggcgacagacagatcggcaagctgaatcagttcatgaatatcgcggcaaaaaccgtaaaaccgcaccatgtcggatacaccgagtgattcagccttttttctgtacggcgcttccatcgcgccttctcctgcaaatacgagtttcagctccgggatgcggttcttcagcagtgccgcagtctcaatgagaagtccttggtttttattgccgtttaattcagcggggtatacgagaataaattccccggcgccgaagccgtgtttttctctcagacgttcactctcttcccggctcacagggcgaaacctgtctgtattcaccccgatgccgtgtatttttttcgcgccgcaagctgtttttttcatttgcttggcccgttcgtaatcctcttcattaatcgtaattaaacaatccgtgtaagaagaaagaaatttttcgatcgggtaataaagaagccagtttttcagaggcgctccgtcacagaagtgaaagccgtgcgcggtgtacagcacctttgtccctttttggcgcgcttgtctcgcggcaaggcgtgcgagcacgccgccgaccggcgtatgacagtgaatcatgtcgtagccgttgtcctgaatgagccgtttcagccgcctgtaaacagaaagattttcgggatgaaacggcgagcgccggatcggaatggaaaacttttcatcaacgaacggaagattcatattgccgcctgccgcgacgtgcacctcccagcccatatcctgaaaccattgaaaatacggaagatgaaaggctttaaaatgataatcgacagtggcgcagaataatacttttttcgtcatctttctgtcctcccatcacacgcctgcggccgcttcttcatgtactgattcgatcgcctcaaacagcctttttctcagctcttcttcaggcagacggctgaattcctccataaaacggatgagtacggcccaattcccgtccaccgctttcccgatatggattttcggaaaaatctgctccgtatgtacttcattatgattcagcaattcttcatacatcttttctcccggacggatgccggagaattcgatgggaatctgttctgtcgtatagcctgataaatgaatcaggtttttggccagatcgacgattttgacgggttctcccatatccagaacgaaaatctgccgcccttttgcaagcgcccccgcctgaatgacgagtcttgacgcttcgggaatcgtcataaaatatcttgtcatcgccgggtgcgtgacggtgacgggtccgcctttttcaatctgctttttgaaaatcggaatgacgctgccgcggcttccgagcacatttccgaaacggacggcggcgaatttggtgctgctgacctttccgaggttcatgatgaccatttccgcaaaccgtttcgtcgcgcccatgacattggccggattgaccgctttgtcagaagaaatcagcacgaatgtttccgttccgcacatgtcggcggcttcggcgacatttttcgtgccgataatgttgtttttaacggcttcttccggattatgttccattaacggcacatgtttatgggcagccgcatgatagacgacgtgcggctcgtattttttcatcaaagcaaagattttatctctgtcctgaatatcggcgatctccgcgtgaaagagcacctctttgccgaagcgtgcggacagctcggtatgtacggaatgaatgctgttctccccgtggccgagaaggacgatttcccgcggaagaaacgcgctgatctggcggcagatctcagaaccgattgagccgccggcgcccgtgaccagaatcgtttttcccttgatgctgtcagaaattttgctcgtatcaagggtgaccggctttctgccgagcagatcttcggcttttacatctctgatgtgtccggcagcctgcgttccgagcaggatctcatcaaattgcggcatgattttaatatgggcgcccgtctgcacacattctttgtataacgtctgaagctcatgggtgcaaagagacggaatggcaatgatgatatggtgaattctcagcctctgcaccgccggcataatgctttcttttccgccgatgacgggcaggcccatgatttcaagcttatgctttgtctgatcatcatcaataaaagccacaggcatgattccgagatcgtttttctgggtaagctgacggacgagcagcgtccctcccgcacctgcgccgatgatcagcgcccgggaagagtcattttgcttcctgccgatcgtttctttcagcacccgtgaaatcatccggcttcctccgatgaacaatagctgaaccatccagctgacggccaacagccggaacaaaatcgtgtggaacaccccgtattggacggcggctgtcacagctgcggacagcgtgatccccttcagcagatcaagcagctcgcctattcccgtgtacgtccatacctgcttatactggtgaaacataaaagcgcatacatgatggctgatcaacatgctcacggcagtcagcagcaacgctccggagtcataaaagtgataagaatcctcaaaaaattgatatcctataacaacggaaagtaaaacgagatacgtatccaatgcaaaaatcattgaaagtcttctccggtaagtcaatctttcccctcctcatttatcggtttagctgatacggttttcgtaaaaaaacagacataacagctaagccgataacaatgcatcatcttaagataaattgggcatttaacccgtcctcacaccccgccaccgacgaccagcatctaaggcagcgaaaaacgccgcccacagcagagccgagtgcctccgttgataaaggtaaggagacatcacctgcaccgctcaatacgagtagtgctccgtttttttgattttctttttattcagcagcgcccccaaaagctttgcctttgactgctggagcgcgtctctcgccttttggacggtatccattttcgtttttccgctcaagacgacgagaacgcttccatctgtctggttcgctaaaatctgtccgtccgccaccgccaaaagcggaggtgaatcgaaaataaccagactgtaccggctgtacatctcctgaatcagctctcccatcgcctttgaagataaaagctcagccggattcggcggcgtcggcccgctcgttaagacgtaaaggttatcaatcagcgttttttgcaccgtttcgccgagggaagcgtttccgactaacacattcgtcaggccttgtacattttcaagctgataggtctcgtgtatcgtcggttttcgtaaatccgcatcgacgagcagcacctttttttcctgctgcgcaaataccgcggcaaggttggcggcgctgaatgattttccttctcccggaacggaagaagtgacgagaatagagcgcaaatgggtctgaacagaggagaactcaatatttgtccgaatggtgcggtattgttcagccaccaatgatttgtgatgtaaaacggatatttgagccagtccccttcttgatttcttttttctgaatcccaaacgcctcactccccgaaatgtttttcatcagaccgtgtctgctgatttttgatgtcatacacaacccctaaaacaggcaagtctgttttttcgctgagctgccgctcgcttttaacggtttcatcaagaaaatggagaaaaaacgcaagcgtcacacccgccatgagagccgcaccgaacgccatcatgatattcctgatgcgcgaaggcttgaccatcgggctttccgatgcttttgcctcagacaaaacaatgacgccttttatattcatcctgtcacggacttcttttttaaatgtcttcatcagcgtgttcgctatagcggcggcctgtttcggattctcgtcctgcaccgctacggtaatgatctctgaatcggtttcgctgcttgtcgtgatctttgcttttaaagcggatgccgtctcagaaagatgcagcgtctgcttcactttctcaagcactaccgggcttttcattatcgtttgaaacgtattgttgtaatgaagattcagctgaacgtcgctgagattcgaatttttttcaccgcttgtttcatgaatgagcacttgggtcgatgcctgataaacgggcgaaatcacccggaattggatgtatcccgtcaccagcgttacaactgctgtcatgataaaaatcagtaaaaatctgtgtttaataatgtcaaataattctttaaaactcatattctcattcatgtaattacagcctcatccttattgcatcaggcttaaacgcccccttctgttaatgattggattataaaagaaaaggtcgaaatttgaaaatttcaaattaagccatttagttctttttaaagaacattatcatgattttcctcttatttactgcacttaccttataattttaaattttataaagaacgaaaaatttcttataatgaacaaaaaatgccagtatacaggggagaattcagcacaatgattggaagaataattcgtttataccgcagaagaaaaggctactctattaatcagctagcagttgaagcaggtgtctctaaatcttatttaagcaagatagaacggggggttcactcaaatccgtccatccaatttctgaaaaaagtatccgccaccctgcaggtcgatctgacggagctttttgatgccgaaacgatgctgcatcacatgggaggcacggaagatgagtggcgcatccaccttgtgcaggccgtgcagtcgggcatgccgaaagaagaactgttcacctttacgaacaaattgactgaaaaacgcccggagcccgcaccctaccgcaacagaaaactgactgaatccaacattgaggaatggaaagcgctgatgcaggaagccaaagaactcggcttgtccgttcaggaagtcagatcatttttagaacggaagcgttactaatgatatgttgatgaaaaggcttttattcgcttcatgtcttcatctctgtttataatgaaaagaaaaaaggggatgaaatcatgacaaaacttaccgttcaaacccgctccggcgcactgaaaggaactgccggccgcggtgcccgcacatggaagggcataccgtacgcgaagccgcccgtcggagagctcagatttaaagcgccggagccgcccgcaccttgggacggcgtaaaacatgccgattcgttcggaccggtttgtccgcagccggatgatatgctgtctatatcgttttccggagatgtaccgcctcaatctgaagattgcctttacctcaatgttttcgcccccgattcagagggcgaaaaaaagcctgtcatggtatggatacacggcggggcattttatttaggtgccggaagcgaaccgctttacgacggatctgcccttgccgctgacggagatgtcattgtagtcacactcaattacaggctcggaccgttaggctttttacatttgtcttctattcatgatgcgtattccgccaatatcgggctgctcgatcagatcgccgccctgcgctgggtgaaggacaatatctccgaattcggaggagacccggataacgtcacgatatttggtgaatcggcaggcggcatgagcatcgcctcccttatggcaatgcctgacgcaaaaggcctgtttcataaagccattttagaaagcggcgcctctcatacgatcccggcggacatggcaaaagacatcgcggcggcatttattcatgaagccggcactgatcaattgcaggagctttccgttaatgacctgcttaagactgcggataaagtgcggcgctcactagatcaaaacatttttcaacttttgtttcagcccgccatcgatccggccacattgcctgcggaaccggtgaaagccatagcaaacggagccgcagaaggcatacctatgatcatcggaaccaatcgtgatgaagcatatttgtttttcacccctgatacagacattcattccgagaaaaagcagcaagattatttgcattattacctcggagagaactgcaccgagcaagcggcagatttatatccgcattcattaaagggacaaatcgatatgatgacggatctgattttctggcggccggctgtcgctttcgcacaaggacagtcgcagcacgcaccggtctggatgtaccgctttgattggcatggcgaaacaccgccgtttcataaagccgttcacgctctggaattgccgtttgtgttcggaaactttgattctttgagaaagacgctgcaagaaccgctcggtgatgacgcagaacagctttccaaacaaatccaatccgcatggctcgcttttgcaaaaaccggaaacccgaacacctctcacttcaattggcctgaatatgataccgattcacgcgaaactttgcttttcaacacggataccgctgtcgaaagtgatcccgattcagcaaaacgccgcatcctgtttcaagcataaaaaacgccaagggagccggctcccttggcgtttcgttttcatcttacttcataatgcaactccgcaaattgcttatagcgcctgacatcagtcagcttcagacctgtctcccggtctccgggtttgaacaaagaaattccgcggccgagcagaacgggtgcgatctgaatgataaactcatcgacaagtttttcctccaaaaccgggtgcagcagatcactcccgccgacaatccaaatccgcttgccttcttggcgtttcaatgcttttataaaatcggcaggctcttcatgaataaaccgcacatgttcagtgcccccggtcaatgtccgcgaaaacacatagcattctttacctttgtacggaaattcctcaggcaataaaaccaatatttcctcgtatgtttttctgcccatgatgatcgtatcgacagattcatagaaagcttcataatcggtgctgtcttcaccttcagttccgattaaccaatctaaagaatgattttcccgcgcaagatagccatctgcgctgacagctccgtaaaaaacgagctttctttgaccgctcataaaaatccctcccccttttttattataccttaaacatgcgggtgaaatgaaaaataatagaatcgggtaaaaaccgccgttaccgggttttcgtttcttcctgctttggagatgctgttaatatgccgtctatccatcttccggtaatcggcataaagaaatgaaggatgatcccgcctaaacaaacggttaataacgttccgatgcctaccggaccttttagcatcacggccagtatgaaaaatatgaagtaaatgaccgttcttgaaaaaaagatgcttctcccggttaattcgcggacaattagcgttaaccgatcaaccgggatcggtgcgaaatttgtgtgcaggtaggttgcggttcctatccctatcacaactaaaccgattgcaaaacagcccgcctttccgtaccatagttcaggcgttatgattcggtgcaggaaaaaaagccacatatcaatcccgattcccgttataaacgccgtaatcatccctgtaaattccggtctttgtctttttaacattgaattacagcaaattaacaggaaagcgatgatgatttcccagcttcccacggtaagccctgcatggacggataatcccacaataagcgcatcaaaaggcgatgttccaagatctgattgaatcgtgacagaaataccaaaggtcaagatcatgattcctaaaacataaaaaacatatttcactttatcgtcctcattttcttattttatgttgcaaatacaacaaaaatacggtatgtttactatacggtattttcattgcaaatacaacaaaaaaaaccagctgatatgataaatgaagaaaggagctgtatgaccatgagtattcaattaaaaaagtgcagccttaacgatataacagagcttcgggagataagcattgaaacattcaatgatacatttaaggatcaaaattcacctgaaaatatgaaagcttatttggaaaatgcattccgctctgaacagctgaaaaaggaattatccaatccgtcttctcaattttattttatttattatcatgatgaccttgcggggtatgtaaaagtcaacatgaacgaagcacagtcagaaaaaatgggggaagattctcttgagattgagagaatttatataagaaaaagccatcagaaacacgggcttggcaaatatctgctgaatgaagctgtgaaaatcgcaacagcacacaataaaaagaaaatctggctgggcgtatgggaaaaaaacgaaaatgcaatcgccttttatcaaaaaatggggtttgtccaaaccggagaacactctttttatatgggggatgataaacaagtcgactttatcatgaccaaaaccctgtcgtaaaaggatacaaaaaacccggccaagctgccgggttttttctcttattttaattttcccgcacggatatcatcggtcattccttcgtacggcgcttctgaaatcagtgcttcgttattgattcccgcattgttgagatacgtaatatccgcaaactcgggaacgacatatttcggatacgtttcatatttctcacgtgactctttcatcacgtcaatgtaatcattttggtagcacaccgtgatttccggatgctcatgcacccatttcgggaagaaaataattccgtgcatccgtttttcattcggcataaagtttaaggaaacgtctgtgcctgtcggttcagtccatgacactttgtatacgccttctgtcagtttgacgatattcacttcctggtcgcgcacccagcggccgcccaccattccgctatgaatccgatagtcgatcgtatgatcatttttaatatagatttcatactcccagccgttttcatacgtgtaaatcatatggcttccgataaagttttccatgttgactcactctccatcttattattgaatttcataaatatctaaccgaatgtcatccggccatctgatcgcagccccgataaacagccggtcctgcagatgctgatatgcctcgctgcttgtttcaaacacaggcacagtgcggaagtaaacatactcgggatcaatgatgcggttcactgaatcattgatgacttttttaaagaaggttcattcaaggacatatcacctcccgagacattatgtttatttaaacatgtaactatttacacgttcaattgtaacgctgttaaaatggactgtcaaataatgagctgcctctgataaagtttacccggaaaaagaggtgttcaacaaaaaagacaagggcggcacatgccgcaacccttgtctttttcattaagctcatctataaaaacgcagacgagcgtcttcttagtaatcacaatctttatctctgcattctttctttcttacagcgcctattgagtgccccatgatcttgtcatttgccttatcgtaaataccatcgaatttattcgatgtatcaccgttgtaatagccaaatacctctatcccgcccattggatctatctcgtatttatctttaaatgtaacgttatgtatgccttcataattcgctttgataaatttttccattcgttcttgagcaatctttatctcttcagcctgagcatttttatcattcatacttttcattataaaacctccggctgctattaagataatgaacataataatatattttttcacagaaacatccgtcccatcagttatgatgaagctcgcggactagaaaaatggtggtgacatccggtgcatttaggcatcttaagatttttcttccgcatccacagaggagctccctattttgtcacctacaggatcatataagccgtcaaattctttagttttatcaccgtttagatacccctcaactgtaattccgccggttggatcaataaaataatcatcataagaaattttatctatacccttgtactcgctacgcaagtattcggtcattttacttttggctttttcgaaaagagcattttcttcctttttgacatcatattgatgcttcataatcagccctccaacagttataattaacactagtacaataataaggtattttttcaaaaaaaatcatcctttccttaccctattttacatgacaagaaaggtgctgtatatcttgagcaagaaaatcaggacttcaaacctgacagatgaaacatattacaggatgagtcaacgtgcttataactatgactatcttaaaaggaaattaaagaagaacgattatatacgtattaattcttccatttcaaaacctacttactggtacgtcgatcaaataaaatcagacgataatacaggacttgatgcggttgtattagtacaagcagtgaagaataacggaaaatggataaaatcaaaaaaccccgaaaacgtggtcgtcgcctttgcgggaaccgatatcggaaaagacccgatcaatgacggcgtaaaagcggacggcggcaatattgttttcggaaatgatccgaaaaaagaagtacattatattgtaaaaaaagacgcaaaggatacctcgaaaacgctcggagcctatcacggaacgccctctcaagacgccatgctcacaaccggaaagtataagctgatgacgaaaacttcgcaaatcgatcaagccgatcagctggtacgcagcgtaaagaaaaagtatgccggaacgtcaacgattatttcaacaaccggccattcactcggcggcgctgaggccgaatacagcgcagtgaataatgatgtgtatgccgtcgcgtttaacagcccttccgtcgtaaaactgcacgatgaagaaacacagaaagaaatcaacagcggcatatacgatccatacatccggtcaattatcaatccggacgacatggtcggggcgggttattggaacgaatatgaccgccacaacgggacaacgatttatacgaaaaacccctcgctctcacagttcagccgaaagcagcggcttgatgggaaattgagcgagcagatcggaaaaaatctcgcttatttcttcactaccgtcattctgagaaatccggatacacacggcttaaacgaagcgaatttcatatttgacagaaacggaactatcgcaaatccgaacggagatgaattagtctttgacaaaaacctcggcgctcttctgccggccggtgcgatcggaagcggagacgcgataaaagtaacgccgaaaaacgcaaagaagctggctgaaaaggtgcaggctatgactgaggatttgcggacgatgaaaaaagaagcgcaaaacgcctatcaagaacacgatgaaaaaatcgccgagctgaaaacggaattttacggccaagtcggacacggcttgtatgatcagcttcaagcacaggacgtgaccaataccattgaagatattgcgctatcttacgataaaggcccgattttttatgacactcaggctgagcaggcgtttattgattctttgcaggcagcgatcacagaccttgaagagatcggcggattcttacataaaatagcagacgaatttcaggaaaaagaccagatgctcgcaaactggttaagatgatagaggtggatacataatgccgacattagacgaacttttagaacacaaggacgatccaatgaagaaaatgctgcagcggcagatgctgaaaacagggatgacgcaggcagcggggacaaaattggagacagtgcgccgaacgctgaaaccgacattcgaaatggatacgttgaaagatgaattatatgaagtgtattcagcactattgaacagctttgaaggcaaggcgcaaaaagctctcgcgcagcggatcagtgaaagtgcgcggctgattgccggcaccgaacataacagagacacattcgttaacagtttcaaaacaagataaaataaaaaaacctcacagatttaacatctgcgaggtttttcctatcgtcttaactgagacgcgctcggagggattcgaacccccgacagacgtggtaccggaaaccaccgctctatccaactgagctacgagcgcacgttttttcaatcagatacctttatattataataaagaaacgcacagaaagcaactcttttttgataatgcaacaacaggattatgcagcttcctcatgcagcataatcctgcatcgtataacggcattgattttcacaaaaaaaccatttcaggcggactgcccccggatcggtacatttccagccacttcagaaaaagcacatttcagctttttttccaaatgtcctttaacgtccaataggtgaattcctcaacctttacggcgcctttctcagaaaacagctcaatccccaatctgccttcattcggatagatacggcttgtcatcgttgtttctccatgattggcgaatacttcaatcgaggatctgtcaataaagatacgcagcgccagcttgccgtttgtatccgtctgcacccttctcacaccgtctttcgctttccccatcttggtgcaatcaagtgtcagctttttatccgtcagattgtatgtcagcacaagttcttcttcgtcaaggccgcgaatcttaaaacctgccgtttcggcatcagaatcgtttatatcaaacacgactcggacttcaagcaggtcttcggacgtctttgccaagtaactccctgaaaccgatcgtccggcacattcccgatattccattttccgcagctgcttggtttcttccacgggattcatcaaaagtttatgatcatcacgcaaagtcagttctcgcggcaaagtcagtgcaccgcaccatccgtccgcttttgtcggcatctcagattcccacatatccatccagccgatggcaattctgcgtcctttatcatctaataatgtttgcacggcgtaaaagtcatggccgtgatccagttctttaaaagcgccgtgtgtaaatttgtttgtttcatcatgatagtcaccgattaaataaccggtttgatgtaaattttgataggaatcaccgtccgcctcgatcccctggggcgaaatcagcaggacatgtttgccgcctaattcaaagaaatcaggacattcccacatatagccgagattaccgtcactttgggcgagaacccccgcgtattcccaatcacgcaaatcaggtgaacggtataaaacgacccgtccgacgttttcttttgaggagttgccgatgaccatataccaaacatcgcgatgcttccatactttcggatcgcggaaatgacgggcgctgtcttccggcggttccgcaataacagggttttcctgaagcttttcaaacacgattccatcttggctgacagcgatattttgagtttgatagaataggtctttctcttgatcaattatattatgtcctgtatagatgagggccaatcttccatgatcatcgaccgcgcttcccgaaaaacagccgctttggtcgaattcatcccccggagctaaggcaaccggcaggtgctcccaatgaatgagatctttactttttacatgtccccaatgcatcggcccccaatgctcatcatacggatgatgctgaaaaaagacgtggtattctcctttaaactgaataagcccgttcgggtcattgatccaattcgcccggggcataatatggtaccccaatcgatatctttgtttcactttaccctcggcttccttcaaagcttcttccgcctgctgaattctatccatttgtaacatcctctctatccgattttttgcagacgctggacacgcctgctgttttgtttcgggcccaataaagtaaatatggagatgacggtaaaaccgaagacgatgattcccatgatgagataggtttgacggaaccccgcactgtcatataatcctcccgcaagcagcgacagaatcgacgcgcctgcctgagatgcgaattgaaaaccgacgagataaaggacggacgacagacgcgtatcaaaattggcagccaaatatttaaaaacggcgatcagcataatcggcaattccagtgcgtggatgagtttcattgatgaaatgcctacaggctcaactgcaattccggacccgacgatgcggaaagccattaaaaatcccgctaaaatcaaactgtttttcgccccgaacttattgacgataaaaggggcaagaaacatcataccggcctccaaaaacacttggaatgaattcagatagccgaatacttggttacccgtcgacactgaaggaaacaaagacgcatagtagatcgggaactgctgatcatatacaccgtaaatgcaagtcaccccgataatgtacatcataaaaaaccagaaatctcttagtaaaaagagccgccccacatcttttaaccggaccgaatccgctctgtttttctcatgatcggtcatttctatttttacagacatgatgatggccgttaatatgacggctgaaacagacgcgatccagaagttgatattgggattgatattgaaaagctgacctgcaaaaaatgcagccgccgcccagcccagcgagccccacattctagattttccatactcgaaatcatatttacggctgaccttttcaatgtacgtttcaatcgcgcctatccccgccaaaaaagcggctcccaaatataagcctccgacaacggcgccaagaaagacgttgtattgtaaaagcggtccatagacgaagatataaaacggacccgtgaatatgagaagacagctgatcataaacaatatctttttcttcagccccaatttgtcagagataaaaccgtaaagaggctgcatgcacagggcaaatacggcgtttacagaaaagataatgcctgtcgctgatccgtttaaattgatttcctgccctaaccaaatcgcaaataaagaatagctggaagaccaagtaaaaaagaaaaagaagaaataagcactcagtttccaatacagactttttgagcttttcatttgcaccgctcctttaataggaccttttaatagccgttttagagccgcatacttccttcttcattttcatcacatacatgcgagctccgagtaagcgcttacctaacatcgctgcttgattctttcacttcattgccgtcagccatctctccatacccgtcacttcccctcactccataaataaagcgctttcaaaaagaattgtatgtcaaccggtttcatatgtcaatcggttgacataaaattttctgattatttcaatcaaatcaaacacaccctctttatatgaaaacagaaacatggaatgtccttgcacatgtcagcctgattctctaaaataagtgcgtgacggaaattgtaagccatttcagtaagcaggagggcacgggaatgaagcctaacattcatgatgttgcgaaaatagcgggagtttcatctacaaccgtttcgcgggtattaaataaccgcggctatatcagcgaaaaaacaaaagaaaaagtgtacaaggcgatggaagaaatcaattactttccaaacgatctggcccgctctttattccgaaaacgaaccaatttaatagggcttatcatcccaaactccagcaatccgtttttcggcgaactcgcctttcatattgaaagcatttgtacgtccatgggctacaaactgctgctttgcaacagtttacatcgaaaggataaggaagaaaaatatttggagatgctgataagaaaccaagtggacggcgtgatcgccgtgacttacaaccggggaattctcaatgatcacaagcaaaatctgccgattgtcgccattgatcattacttatcggacacgattcccgtcgtcggctcagacaactatgacggcggaaaaaaggcggcagaactgctgattgaaaaagggtgccggcacatcgtccatatcaacggcccgattgaactcgaaacaccggcaaacctcagaagaaaagcatacgaagacgtcatgcatgaacacggacggaagcctattacatatgaagtacccttttatcagcattaccatgacattatttcaacattattcgatgaacagcctgacaccgacggaatttttgccagcgatgatatcatggcggctgcagtgatgaccgaggccaaaaaacggggaatggacatcccgaatcaattaaaagtgatcggttatgacggcactgaaaccgttcaatcgattctgccggacttggcaaccatccagcagccgattgaattgatttctaaaacagccatcgagattttagcaaaagaaattgaaggcgaatttgatgatttgccgctggaaacgtatttgccggtacggcttttggaagggcggacaacgtagtcagaccgttcagccgtacgtagcgacgcgattgcggtctattttgagcgctccggccatatcattttctcaaggctccggcattgatcatcctcatttccactttgctgtttgaactttttgttttatgggaaaaatggtgttagaagaaaaggttggcattttggtcagcgttttgtttgacctttattgaccaaaaatgtatcatgtaaatacatacttacctaaaaggtgaaggaggagcattatgaatttaatacctacagtcattgaacaaacgaaccgcggagaaagagcttatgacatttactcccgtcttttgaaggaccgtattatcatgcttggatctgcgattgatgacaacgttgcgaactccatcgtgtcacagcttttattccttgaagcggaagaccctgaaaaagatatttccatttacattaacagccctggcggatcaatcactgccggcatggcaatctatgatacaatgcagttcattaaaccgaaagtatccacgatctgcatcggtatggccgcttctatgggagcatttttacttgcagccggagaaaaaggcaaacgttacgcgcttcctaacagtgaagttatgattcaccagccgcttggcggagcgcaagggcaggcgacagaaattgaaatcgcggcaaaacgcattctcttgcttcgcgacaaattaaacaaagtgcttgctgaacgtaccggccagccgcttgaagtcattgagcgcgatacagaccgcgacaacttcaaatcagctgatgaagccttagaatacggcttaatcgataaagtgctgacacgcaatacagaagaccagaagtaatgccaaaaaacctgcaagagctgatgtctcttgcaggttttttatgctttattcccattcaaaaaagtaatgaatgctttgacgacagataattctaacgctgaagaatcatacataagccaagtatcgcgtatcacaggctcgttatttttataggatagcgccaatgtgtataattcatcagaaggctgaagacagatttccggcacaacagaataaccgagaccgtttttcaccatctctttacaggtttcctgcctgtctacctccatcgcaatgaaaggcggttcagtaaattggttattccaccatttttgaatcaaacttttcaaagaagcatcagtttgataataaatcatcggcaatttgggaaggtcctcactgttgatttcagtttttgaaataaggtacagccgctcttcatttagcagttgtttttccccttgccaatcataatttcccctcataatcccaaggtgtacccccgaatgatgaagcagatccatcaccttcgcactccatcccgtattgacgtggaattgaacagacggatactgatcagaaaaccgttttagaatcgccgggagcttatactgagcaaaattgcttgagactcctaatctgagaaccccgctgacttcatggctcatattgagcatatcatccttcactcttctgaattcctgcagcatctctttcgaataatcaaccagatgttcaccttctgaagtgaactccatccctttttttcttttataaaaaaggcgcactccgaattgtgcttccaggtttttgagccgataacttaacgccggctgtgtcatatataatcgctctgccgccttcgtcatatttttttcttcgaataatgtaatgagcacaatccaatccttttcatccatatgaaatcccccaaaatatttttctgctataaaatttcctcctattataaaagttttttattcaactttataaaaattatatgttttacttataatccttatttatcatacgatattttccaaagggaccggtacctttttatccacacaaaatgatgtaaggatgagacagcatggaaaaagttcctgtaaccgtcatgagaggcggcaccagcaaaggcgtttttattcatcaaaaagacatgccagacgatacaaacctatggagcgattttcttttagacattatggggagccctgacgagagacaaattgacggtctcggcggcggccattctctcacaagcaaggcagccattattaagaaatccgccagaaaggatgcagatgttgagtatacgtttgctcaggtcagtttgactgaccattttacggacttcaaaggcaattgcggaaatatctcttctgccgtaggcccttatgctattgagaaagggctcgttcaagctgaagagccggttacaaaagtcagaatgttaaatacaaacactcaaaaagtgatcgtagcagaagttgaagtcagaaatggaacatttcattaccagggggactgctctatccccggggttccaggtacagcttctcctatttatctttcatttcaccaggctgaaggagcggtgaccggaaaactgtttccgaccggtcagcctattgatgttctcgatacaccgtatggaaatatctcggtctcgattattgattacgccaatccgcttgtctttgtaaaagcagaggacacggggcttaccggcttagaacttccggatgaatatactccggatatattggaaaagctcgaaatgatccgatcaattgcagccgagaaatgcagattcgctccgagacatgaggctgctgcaaaatcaccggccgtaccaaaactgactttaatctcgtctccagcggattatattgatacaaaagggataaagagacacgcagaagagatggatcttgtcattcgtatgatgtccatgcaaaaaccgcatcaagctttagccattacaggggcggtatgtacgactgccggcatgctattgcaggatacaatattatctgaattttcattctatggcagaacgattcgattgggacatccaagcggcattttagaaaccgaggcagatgctgatccggatggaacaacgattaaagtagtacgcacagcaagaaaaatctctgaaggctatgtgtttacaaagcaaagttacaacctgaatacgctgaatcacattggttaataccagtcttcagacaagtcaaagataaacggaggaatgcgagatgatcaatgtaaatgcgtctaatcgattaaacagactgcctttttcaagggcccatcaagcagtgctcgttatcctttcattcgcttacttttttgattttatcgatttaaatacgttttcatatgcggcgccttcacttttaaaggaatggaacgtttcgactcataccatcgcttttattacgtctgtctcctatttcggaatgtttatcggtgcctctgccggaggatggttttcagaccgtttcggaaggaaaaaaggtttaattctggttgtcacttttttctctttcttctccctcctctcttctctggcttggaacccagaaatactcggtgtttttagatttcttacgagtttgggtatcggcgccacaacgattgtggcaagtacgtatatcagcgaatttttcccatccgcaactaagggtaaataccaggcaatctgtattacaatcggcatatgcggaattcctgcagccggctgggtggctaaattggtcgtgccgtccgcctcttacggctggcggtttatctttctattcggcgcggtcggtattttttttccgctaatcgccagaaaactggaagaatcaccgaaatggctggacacgaaaggaaaaagcgaacaagcacaccgcattctgcttgaactggaggcaaaagcagaaaaagaaaagggtgaactgcctgaaccagctccggctctacgaagcagacaaaccgctgtaaaatccgttccatatcggacgttatttcaaaagcctttggcaggaagaacttttgttttaatgacgatgtgggcagcttccacgattgcaattcaaggctttggcacgtgggttcccacccttttggtaaaagaaggcgtatcaatggatgagtctatcgtatacgtcactctgggaacgatcggtgccccgctgggcgctctcattgcctcgcaaatctctgaccgtgtggatcgaaagtgggccatttctgttttatcgttaattattatggcgcttggattcttttacggcatcaatcctttgccgatggtcattgtcatatgcggatttctcatgcatatgtttgagcgtacgttcagttcgatcgcatatgcctatacgccggaattatatccggttgaagccagggcgtctggaaatggtctcacttacggcgtaggacgtcttgcaaatgtagccggtccctttgtcgtcagtttcctgtattcaggctacggatttttaagtgttttcttgttctttacaggctgctggtttctttgtgcactgacagtcggtatatttggaatcggttcaaaaaaacaaaagatgcagcaggatgatttcatatcggaggaaacattcgtgcaacaaaagttgtaaacgcatacagtctgcaaaccgcaaaacatccatctcctctgaggaaatggatgttcttctttcaaccccaacagcattctctttctcatcttattctcatacatatgtcttatcatgaagaaaggtgtgatacgcatgagaaagagaaaacgatttccagaaagaaaaggtattctataggcggagaattttccatcagaatggatcagatgcagccgccgaaacataatttcagacctccaccttacaattcccgccatttcttatctaaaatcgggtatgtataccgattcatctgctcaatcagctcatccggccgggaggaactgtgtatcagttttaaatgagactcattcgaaaatccttcctgaatgctgtacttgaccatcttcatcatcggctcaaaatacccgttcacattgtacagtccgatcggtttttgatgaatgccgatttgcgcccagcatagcacttcaaacaactcttcatatgttccgaagccgccgggcatggcaatgtacccatcggcaagttcactcattttcgctttccgctcatgcataccgctgacttcaatcagttccgtaagattctgatgaacaatctctccgctgaacagcccgctcggcatgacgccgacagcttttccgccgcctgccattaacgcatcggcgacggttcccatcagaccgacccgtgaaccgccgtaaacaaggccgattccctgctccgccatatattcacccagttcggccgctttgcgtttgtactcttcatttacccccgggtttgaccccgcaaatacacaaatggttttcattttttcatctccgcatctatatatgtacatcaataaatcaaaacacactatatattgtcccatctctatatgataatatcaataagaatcatacaggacataaggagtgtttcacatgcagatggctgaagcagaacaatggacgaaagatttttatgaaaaacgaggatggacggcgtacgggccatttatcagaatcggttttttaatggaagaggcgggtgagctcgcccgagcggtaagagcatatgaaatcggcagagaccggccggatgaaaaagacgcgacccaggctgaacgcaggcaggagctgattgaagaaatgggtgacgtcctcggaaatctggccatccttgccgataagtacggcatcacgttagaagatgcgatgaaagcccatcaggaaaaactgatcaagcgctttgaaaccgaataaaaacacggcctgtccgctttttcatggacaggccgtatctgaatttatcccgttatctcgtcctgatgctcaaagaaatgctgtttcccgattttatgaaacagccccgtcttccggatcagctctctcggctgtgattgcaatccgacgatcatcaatctcccgttatgccgtttgatccggttcatcacattccccagcaccgcttctgcggaggtatccatgtaatgtacattattcatcagcagaataagcgtcttcggcttttcctgaagcctctccagcagcgatgtttccagtgaatcaattgaaccgaaaaacagcggcccttcaatggaatatgtgctgacggacgaatcatttttaaccgatttgacagcggcatgcggtgttttgatacgtgttgattcgctcattttcctgataaagaaaacaaaagcgagcacgagaccggcagaaacgccgatgattaaatcaaacagaaccgtcagcaaaaaggttgccgccagtacgaatgaatcagtgtttttcagccgcatcatattggcgacttccctccgctcactcatgttccaagccacaaccatcaataccggcgccatgcttgccagcggtacgtgaacggcaagcggggcgaagacgagcaggacgaggaggacggtgactccgtggacaacaccggaaatcggagaaactgcgccgtttttaatatttgttgcggtccgcgcaatcgctcccgttgccggtataccgccgaaaagcggcgctgccatattggcgatgccctgcccgacaagctccctattgctgtcatgccgtgatcctttcatattgtccgcgaccatcgccgataatatggactcaagtccgccgagaagcgcaatgatcagagccgacggaaacatcatgatcatgttatcgattgagaaatcaggaagctggaaagccggaagctgccgcgggatttccccgtaagcagaaccgattgtcgccattttgtcaggaaaaaacacgaccgccgcggctgtagagacaagcagcgccacaagcgcgcccggaatcttcggcatcagcctggctgataacagcaaaatggccaaagcaattcccgcgatgaggatgctgtataaattaagggttccgatcttcttgccgatttcggcaatgttgaggataaagctttcatgcttttggatatcgcgcagaccgagaaaatgggcaatctgctccgagaaaatcagcaccgcgattccggccgtaaatccgacgatcaccggcttcggcacgaatttcataatctttccgagcttaaatacgccaaacaggacgagcatgacgcctgccataaaaccggctacaagtaaattctcaaaaccatactgcatcacaatggcaaataaaatgggaacaaacgcccccgtaggcccgccgatctgatatttagagccgcccaacagcgaaatcagaattccggccacaataacggtgtaaagcccgtattccggaccgacccccgaggcgatggcaaaggccattcccagtggaatcgctacaattcccaccacaattcccgcgattaggtctttctgaaatttctgcaaattgtatccctgatatctgccggtaaattgcatcgtcagctgcatcctcctttgactgtttcataaccgtcaacgactacatccagcgtccccgtccccggatcgatcaccagcccgtgcaccggcacctcttcaggcaagagcggatgatgcctgaccatattcacgctgtgggccacgctttcttcgacgctgtgaaaaccggtcagccatgtttccaaatcgactcccgcatgctgcagaaggctgagacatttgtcctccacgccgcgctctttcgctttatttaatatggaagccgcatttaatcccgacattccgcactcgcggtgacctatgatgcagacttcctctgcctgcagttcataaacggcaaccaaaatgctccgcatgacacttccaaatgggtgagaaacaatggctcccgcgttttttatgattttggcatcgccgtttctgagtcccatcgcctgcggcagaagctccgtcagccttgtatccatacaggatacgatgacaagcttttttttcgggaattttgtcgtttggtaaggttcatatttcctttcttggacaaactgctggttgtgctccaaaatgcttgataaagaaaccatttttctattcatctcccatccgattgtattgcaagccttcttacccagcttacagtaaggaattatagcacagaaaaaggcctcaaaagcgctttcaaaaaaagacacgataatttgactgtaaattcagattatgttcatttatatctttcaaaaataataaaatttatctttacacaaacctataaagcttttgaaaacagcggttccgctcattttgccttcagaaatataggcggattctgttattgtttggagaaatcaagcatgtacatttctttttctttcattttaagttcaaaagaaccagaaatttatcgtaatgcgtttgaatatttctcacgttaccgcttctcttatataataaaatagagaagaaagacaaaggaggagaagcccgttgaaaccctatgtattcatcgcgaaaccgataccgccggaagtcgaacaaatgataggcgagcattgccggtatgacatctggaaagaagataccattccaaaagaggaactgtacgaaaaaatgaaagatgctgaagggctgctgacatccggaacggcgattgacagtgatttactggatcacgcgccgaagctgaaggtcgtcagcaataattctgtcggctatgataattttaatattgaagaaatgaaaagacgcggggttgtcggcacgcatacgccgtacaccttagatgacactgtcgctgatctggctttttcattaatcctgtcttccgccagacgggttgccgaattggatcgattcgtccgcgccggcaaatggggaaccgttgaggaagaatctcttttcggtatggatgtccaccatcagacattaggaattatcggcatgggcagaatcggtgaacaagctgccaaacgggcaaaattcggcttcgatatggacgtgctgtattataaccgcagcagaaaaccggacgctgagaaggaactcggggttacatatgccgacttagatacactgctgaaaacatcagactttgtgcttttaattacgccgcttactgacgaaacgtatcatatgatgggagagcgggaatttaaatatatgaaagatacggcatgtttcgtcaatatttcccggggaaagacggttgatgagaaagcgctcatccgcgcattgcaggagggctggataaaaggcgccggtttagatgtgtttgaaaaagagccgatcgccgaagacaatccgctcctgcagctggaaaacgtcacattgcttccgcatatcgggtcagcaacggcaaaaatccgtttgaatatgttcaagcaggccgcacaaaacatgatagacgccgtatacggaaaaacgccgaaaaacctcacgaaggaatttcaatgagatgaaaaaccccggccgtttcagccggggtttatttttcgctagatcaaaaggactatttttaaattctttctattcctttctctcgatgctgatacaatgaaaaggaatcagcttcacatgataaaaatgggaggtattgctttgaaaaaacgattatcgtggatttccgtttgtttgctggtgctgttctccgcggcggggatgctgttttccacggctgccaagacggatacatcttctcacaaggcgcacactgaagcacaggttatcaacacgtttgacggggttgcggattatcttcagacttatcataggcttcctgataattacattaaaaagtcagaagcgcaggccctcggctgggtggcatcaaaggggaatcttgcagacgtcgctccggggaaaagcatcggcggagacatcttctcaaacagggaaggcaaactccctgccaaaagcggacggacgtggcgtgaagcggatattaactatacatcaggcttcagaaattcagaccggattctttactcaagcgactggctgatttataagacgacagatcattataaaacctttacaaaaatgagataaacacatacaaaaaacggcttccctgcggaggccgttttttttgcagagaacctgcgagcttcatataaaatgagcagtaaatttttcttcaaactctgatcggtctattctgctgttttccgccgtgccatcgtgtttttttattgttatattgcgttcagacagaaccatgtgcccttccggtgtccgcttagaagcaagcaggcgtttgttgaaaggagagcgttcatgttcaaagattgtttgtttcatagacttgaggtccttttcatcgatttcttcaagggaaaatgcgtaacctgtctgccagccgtcccctttgttcatttcaagcaggtatgtcccgaattccgtctcttctatcctcacgcggaacgctccggccgctgataccgtctcgtctcccgacatcggcacaggctgcatggcgagattgaggccgaagcctgcatcagcgatgtactcattccccccggcggaaagaagtacggccgcatgtgtgccgggcagcgcccagccgtttttccagaccgttccgcggatcaatttgacatcaaatccggcatctttcaggatgaaataaagcagtccgttcaagtcataacaaaggccgccatgaggttccttcaccatgtgccgccacagtccttctttcgtgacgtcatattcttttttggacaaaaccgcgcgattttcaaacggaaaccgatatgcgagcgcctttaaaaactccggcaggttgctgaaatcgagggaatccttttcccagcctatcgtttgataacaatctttcagaaactcattcatcgttccgtcccccttacaaagtgtttacacttcttcctgcacataagcggacaacttttccagcgcttccttttcatcgtcgccttcagcgatcagagtgacttccgtccccgtgctgaccgccagactcattaatcccataatgcttttggcattcactttcttgccgtttttctcaagaaacacatctgatgcaaaacgatttgcctcctgtacaaacaatgcagcggggcgcgcctgtaatcccgtctttaaacgcacttccactttctcctgaaccataagatctccccttttctgtacggttatttcaaagtgatgctttgtcctgtacgcagctgttctgcgatttcatcgagctttctcagcctgtgattgatgccggatttgctgattttcccgcttgcaaccatttcccccagttctttcagcgtgacctcctgataatcaatccgcagctgcgcaatttcgcgaagcttttccggcagcgcttcaagaccgatccgttcatcaatgtatttaatattttccacctgtctgagcgaagcaccgatggttttgtttaagtttgctgtttcacaattgacgaggcggttcactgagtttctcatatctctgacaatccgcacatcttcaaaacgcagcagtgaattgtgagcgccgatgacattcagaaattcagtgattttttccgcctcttttaaatacgtaatatagccttttttccgttcaagcgttttgctgttcagatgaaattcattcagcagcgcgcataatgaatcgttatgttccttataaagcgagaagatttccaagtggtacgacgatgtttcgggattattcacagatccccccgccaaaaacgcccctctcatataagaacgtttgcagcagcgtttcgccaccagttcctcagaaatattccgttcaaatacaaagttctctccgaggattttcaattcctctaaaatcagctttgcattttcagaaaagcgcacaatataaacattgttttttttcagccgcattttttttctgactaacagttcgaccgatacatcatattgtttcttcagcaatgtataaatgcggcgggcaatcgccgcattttcggtttgaacgtcaagcacgagatggcggtttgaaaatgacagtgaaccgttcatccgaatcagcgcggacagctccgccttggcgcagcagtccttcacttccaggttcgtcagttctttttttgtttccgatgcaaatgacatattagccacctcatttcaaaaggcctctagtcccttaataaatcgacaagaagagaagccactttatgtgtatcgtgacggattacgccatttttatacgtgataatctgatccctgatgacctcaagccccatggatttcagcttttcaacattgaagtcgacgggccgggccagctctttcgcatatttgcttttgatttcgtcagggatctcctcgttgttgattaagatcgtgtcgataaacggctgctccatatgatcgttcagcgccttgacatggtcggccgcactgtattgcagcgtctctccgggctgcgtcatgacgttgcatatatatacttttttggccgcagccttgacgacttcctctccgattttcggtacgagcagattcggaagaatgcttgtgtacaggcttcccggaccgataatgattaaatcggcctgacggatgacgtcaatcgtttccgggagcggatcaattttttcaggcgtaagaaacacccgtttaatccgctggccgtaagaagggattgtcgattctccggagacgacctgcccgtcctccatttcagcgtgaagaacgacactggtgttggcagccggcagcactctgccgcggacattcagcaccttgctcatttcggtgacagcgtgaaagaaatcaccggttatatttgtcatcgctgccaaaatcaaattgccgagcgaatgtccggttaagtcgcttcctttgttgaaacggtgctgaaacagattttcaacgagcggctcaacatctgacaaagcggccagtacgttacggatgtcacccggcggcggaatttgaagttcatcccgcagacggcctgaacttccgccgtcatcagcaactgtcacaatcgccgtaatatcaacgggcttatgctttaacccccgaagcagcacggacagacccgttccgccgccgaagattgcgattttcggcttcttattcatttccggcttctcttttcaatgtcccggtgagtgacatgagtatagaaatcttttttaaaatagtcagccaaatactcagcgagcgtgacggagcggtgctggccgcccgtacagccgatcgcgatgacaagctggcttttaccttcccgcttataagacggaagcataaagccgagcagatcaacaagcttttcaataaacttttgtgtttcgttccacttcatcacataggatgacacttcctcatctttccccgtaagcggcctcatgctttcaatgtagaacggattcggcagaaaccttacatcaaacacgaggtcggcatctatcggaagcccgtatttgaaaccgaatgacatcacgttcactgtaaatgtttcaccttggttcgtggcgaaatgcgccacgattttttcacgcagatcacgcggtttcatatccgatgtgtcatagatcagctgagagcgccctttcaattcttcaagcagctggcgttccagcgcgattccttcgagaggaagcccggtagcggccagcgggtgagaacgcctcgtttctttgtatctcgtcacaaggatggaatccttagcgtctaaaaagagaatgcgcggtgtaatccacggattttccgccatttcgtccagcgcctcaatcagcctgtcaaaaaattcacgtccccgcagatccatgacaagcgcgaccttgctcatttttgaacttgattctttcatcagctccaaaaatttcggcagcaaggaaggcggcagattgtcgacgcaaaaatagccgagatcctcaaagctttgaatggcgacggttttccccgctccagacattcccgtaatgatgacgagctgaatatcatggttttcattcatactcatctttctcccccctgcggtctttcttttatttgataagctgcggatctaaacgatagctgagcagctcgaagtccggcgtatacgtaaaggtgccgtgcaaaagcccttggcccttgatcataaaatcaaggatatgcccgtctccgggggccatcggaaggctgtggatatcttttacgtcatgccacttcagaacgccttcctctgattcagcgacattccgccccgtgtacgagtcggcgacgaaagtaaacatcatccactctgacacgatttgttcctgttccttaataataaaggtaaacacgccttttaactgcggatttagtatataaatgcccgtctcttctctgtactccctgatgacggaatctctgacggactcgccgctttccatcttcccgccgggcgcgacccaccagccccgtctcggcttttggagaaggagaacctgatcatctgtctgcagcacacaatttgtcactctttgcacaagtacgtcacctaaccttctcaacaaatcatcgtctcttcattataccgtttcggcatgtctctcacaatgcagagacaccgacatccttttcttttatttgacagaaaacagaaaatcgcaaaaaaagggcacggatactggaatccgtgccaaagtgtattcattaaaaagggggtcaattactacattcatcttaagacatcagtgtttcacccgtgttacagcgtaattaaaacacagtaacgattcaaaaactgaacattacagtgattatttaacggttttgagcgtttcctcaagctcttccacataatgctgaacgctttgagccgcaatacttccgtcgcctgtcgccgttacgatctggcggagcgttttttcacggatgtctcccgcggcgaaaatgcctggaacttttgtttccatttgagcgtttgtttcaatgtagccttcttcatttgtgatgcccaagttttcgaacggtttagaaagcggaagcataccgatataaataaagacgccgtcagctttgaattcttcctcttctcccgtcacggtatccacaagagtaagtttaccgacttttccgttttcctcatggatttcttttacggttttgttccatttgaagtcaattttctcattgtcaaaggcacgcgcctgaagaatgctttgcgcccgcaatttgtcacgtctgtgaacgatggtgacttttgaagcgaagcgtgtcagatagacgccttcttcaacggcggagtctccgccgccgacaacgacaagctctttatttttaaagaatgcgccgtcacaaaccgcgcagtacgatacgccgcggccgcccagttctttttcgccgggaacgccgatctttttgtattccgctccggcagaaatgacgatggctcgcgctttatattcttttgaaccggctttgaccgttttatattctttgccgtcaacgatttctttaatatcgccgtacgcatattccgcaccgaattttttcgcatgttcaaacattttattagaaagttcagggccgagaatgctttcaaaacccggatagttttcaacatcctccgtgttggccatctggccgcccggaattcctctttcgatcattaatgtggataagttcgctcgtgatgtgtaaacagcagcggtcatccccgccggacccgcgccgataatgatcacatcataaattttttcttctgacaccatgattcactccttttcgaaatggggcgcaccctatatgactaagaatccccatcaatcgtattccttacccatatcctattaaatctgagggcaattcgctatttttttgctcatttttctaagaaaccgtgattaggcagctcctgagcgggtatacaaataaagaaagagccttccgggatagaaggcccttgtcttattcattattgcacgacacgtcttacattgccgttgaatgctttcttccagtaagggttgctcatagaatcaatggatacaccgtgtgatgtattatcgttcaggaacgttccattacctaagtagatgccgacgtggccgtttgttttatacgtattgaagaatactaagtctccgcgtttcatgtcagacgcgcttactgctttacctcttccgattaatgtatctgtgtttgtgccgcttgcaggtccgaggttaacgcctgcgttagcataagcccagcgtacgaatgaagagcagtcaaaaatacggttgttaatatcagattgagtgcgtccgccgccgaatttgtacggggattgacccacaaggcttgaacctacgctgatcgcgccttcaataccgcctgaatttgaaataacagatccgccgtcagaatcatctgaaccgccgctgttatgagatgatccgcctgaagtgctcttcggtttgcttgagctgtcagatgaatcagatgatgttgaaacagccgcttttttcacagttttaaccgccggtgccggctggctgtcatctttttggttttggtcttcagaagctttttgcgcttcttcctgttttttgatcagggcagccgctgcagcctgctcagctttaatgcgcttctgttctttttcagtatcagctttttcgtttgcaagctttgatgcttcttttttcagatcagagatagcggaagccgcttttttctgaccgtttttcgcttcgtcgaaaagcttgtctttctgatcaagctgtttgttcaggtctttttgcatagactcaagtttcgcaagatcatcttgaacttttttcagcttcacgttaagttcagcttctgcgtcttcgagtttcgctttatcctgctcctgctgtttgatcagctctttatccgcgtcaacgatagaagataccgcagtcgcacgggaaatgaagtctccgaagcttgtcgcccctaaaagaacatctatgtatccttgagaaccgccgttttcctgtaaagaacgaacgcgttttttcaggatttcattgcgtttttcaatacgcgcttctgtttctttgatttcttttttcaaatcagcgatctgctttttcgttttttcgttttcagcttttttatcttcgattttattgcttgtatccaacgctttagcgttaatgtctttcagttctttttcaatcttagcctgcttgtcctgaagcttagacaattctctttcttttgcttcaaggcttgaagccacctcagattgcttgctttcgatttttgcttttttgctgtctaatgtttccgccgatgcagtttttgtaaacgggatcaaaaaactgcttgtcccgatgacggaagccaaaccaagtgttaataaactctttttcactttttctttcctcccttttactttaaacctgttctcatttggaattctattatgaacatcaaagttacgctccctcacatacccgtgaggctgatgatttttatgtatgaatctttaaatcttttaaattggtatagattatacagcacatgtaaaataaactaatctcttatgtacgagactcattataccatcatgtttcgacaatttttattacagttatatttcaatgtgattgcaaatctcatattttgcaaaataaacggtgattacggcctgatttcgattcgaaaagcaaaaaaatacgtatgatacctctttattcggcggtaaagttctgttttgcccctttctgataaaaaaagaaccgactctttatatagaaagaatcggttttattctaatatatcgtctatttgtctgatgtatttcgaaagtgttgccggcgttataccgtaaacggcggccgtttcttttttcgtcgttttttcgccgtttgcttctttccatacatatgcgatggctgcggcccatgcccgctcattctgtacggcagcggcggcgcggatgtgctgaatgacgtgaaaaacccagcagctcatgacgtcagtttttaaactgtcggcttccgctttctccagcagcttgaccgtccgatacgtgaacagcgcatcaccggagacgcctgaagcgcctttttcaccggaaagcagcagtttgacgaaatcttgttcaaacggtgaaacggcgcgttttgccgtcagaactttttcaagctggttccgctctccttcagcgctgctgatataataggcggcaagccgctgttcaagtgaagcaggcagcggttcctgccgctccgcccaaggcgcgggccggtctgattcgggaaattcggcttcggcctttttccaaatggtttccgcaaattctgtgcggcctgtcccgtaggctgaggcggccagccagtaataaaacgtttcgtcgccttcgaatccgcttttgtaaagagaacggagccatttataaccgagatcatgtctgccgacaagcgcaagcgtcgcccccagcttatagcgctgttcgaataaaatcggatacacattggcgagttttccgctcaattctccgactttttcatcttccctctcgtaatagcagaatacaaggaggttgcacaaggcatggagattgccttcatttttctcaagcacttcgaataccgtttgtttcgcttttgtgacattgcctgagtaaaagtaagcgagcgccaggttgttgtatgcagaccaaagctcggggtaatcggccgtaatctcttcaagcatgacaaccgcttcatgaagctggccgctctcaagaagcgtttttgcccgatcctgcctgatcagcagttcatcctggtcatagagcgattcgttttcacccgcttcgccgaaatccaatagctccatcagattttctatctcttcgctgaattcaccgtccggatcggcatctgaataagccgctgcttctttgtatgcttcctgaaagagtcccaaatgcgcgaaattattcgctttaaagtaatgacactcgggcatttcttctttcaggttcaccaaaataaagtcgaacagctcatttgactgctggtagtggcccatttcagaataaatgacggccagccgggacagcatttcggaatcattcggctcgaggtggacggcccgctgaatcagtttgctggcccgctttaaattccgctctttatatgcttttaagcctttatgaaaaaaatattgtccatcctgaagcagctggacaatttgcgcgtgctttttctgttcagaagtgtgttttcccacaaatatcctccgttttatacgtattaccgtcagtagtataccataaaacggtttcacctcaatagttcaaaagacaggatcggcttcgttttttactggctggttcgaccagattttagctgtttttttcacgaggctcggctggaagaatgacgcggaaaagggttccttcgccgcgcttgctctcaacctctatcgaacccccgtgcagctcggcgattttttgggcgatggacagaccgagcccgcttcctccttcgtttctcgccttgtccgctttataaaaccgttcaaatacacgctccgcctgttcaggctccattccgattccgtcgtcggcgatttcgacagccgccgctcccggcagatctgcaattttaacggaaatgcggccgccttcaccggtaaattttacggcattgtgaatcagattcatccatacttggctgagcagcgcttcatctccgtacacatacgactcctgtaaatcaatgagaaactcaatctgtttggcggaccactcaggctcacaagtcaatatggtgcgccgcagctgtttgtcaatgcggaacggttttttttgtatcggttcggtttggcgttcgagcgcagtgagcttcagcagattttcactgatttttgataatcgttctgtttctgtttcgatgatgtgtaagtagcgcccccgctcctcatatgataaatccggttttttcagaagatgcgcgtagccctttaatgaagtgagcggggtttggatttcatgggaaacgttcgaaataaattcttgtttcagtttttccatttcactcagttccgcggcgagtgtcgacagttcatcagccaatttcgtcacgggatggttccgctcaatcttctccattttccgggaagcggccgctgtgaagttgccgctcgacatttgcttgatcgtggcggtcagcgaatcccagatcgcatgatgtctttcacgtgctgactttgaaaaaataaacatcgttacaaacagcaggccgaaaacaagccaaagcgtcagaatctgctcggcgtacgacacaagcaaaatcggccatatgagaccgaatccctgaacaatcaggtgagccgccagccataagaatgcggtgacagtgagaaggatgatgatttttccagccgttctgaagatccgtttcatcctgtcaccacaaaccgatacccgagcccccgcaccgtatggatggcaaacggatagtctttttccggaaaccgttctctcagccttttaatatgcacatcaacggtccgctcgtcaccttcataatcaaagccccaaatatcttctattaattgttctcttgaaaacgtcttattcggataaccggcgagcttaaataaaagctcaaattcacgccggggcaatgtcaatcccgctccgccgccgcgcgttacggtgcgggattgcttatctaatgtgaccgttccgatggtcagcagtttttcagcggtgatccggtaccgtttcagcaatgctttgacccttgcttccagctcaagcggctcaaacggtttgacgagataatcatccgctccggaagtaaaaccttgcactttgtccagcgtttcgccttttgccgtcagcatcaaaatcggaatgtccgtaaagctgcggacggcttcactgacttcaaacccgtccattttcggcatcatcacatccagtatgatgagatctataggtgctgattcgatcagccgcaccgccgcttccccgtcttccgcttctgcgacgtcaaaaccgctctgctccatcataaggcggacaagctcacggatatggcggtcatcatccgcaaccaatatgacagccatgaaaatccctccttctgcttttttgcctgtcttcttttaatgaatcgacatgatgtctattaaccgtcttattttttcattgtctcctgtatcgacagacactttttttgtatggcggatcatttcctccgtcacttctttcattacgccttgatcagtatcttcacgagactcccagcgcaaaggaacattgtatacctgaatggtgccgtcaccattgctgctgtaagtgactgacccatcgattaaccgggagcctgctaactgcgtaacatcttccggatagcgggcgctcgtgtgatcgtcagggttgacgagtgctccggccggaatgcggcgaacgttcaattcatctatctgctgattttccccaagctgcagccagatgcgggcatattcaatttgcagaggagaataatctgccgacatgttatccggttcgcttttgtccgcagagacgtgatgtgaatctttgtttacgggttcttttttttctgccgctgatgctgtttcagcctttttgatgccgctgctttctccggccggacttgaagaatggctcggctcttcatcgttaccacccgtacacccggcagtcataaatacgagcagtaaggccgcgtgacaataaaaaatctttgtgcgttttttcatcatttaaccctcgcttccaatgaataggattccggctgcaaaataaaaagcagctttttcagctgctttttattcataaagtcttgctttacacagctttgttttctaagtcggcattcagcttcagctgctgctccgcaaaatcgcggtacaacgaatgggatgccattaattcatggtgtgtgccccgtccggtgatttcaccctgttcgacaaagagaagctgatctgcatccacaaccgtggataaacggtgggcaatcacaatcgtggtgcggcctttcattagaacttccagcgcctgctgcacccatttttcagattggctgtccagacttgatgtcgcttcatcaagcatcagaatgctcgggttacgaaggagagctctggcaatggcgatgcgctggcgctgtcctcctgaaagcataattccccgctcaccgacctcggtttcaaatttcttcggtaagtcttcaataaattgcagggcgtaggccatgtcagccgcttgcctcagttcctcatcagtcacctcgcgttttaatccgtagcagatattgtcgcggatggtgcctgacattaacgggctttcttgcgacacgtagccgatatgctcccgccatgactcaagggaatacgcatcaatcggttcatttccgagcaggatgctgcccgcagtcggattgtagaatcgttcaagcagcttaaataacgttgtttttccgccgccgctcggtccgacgatcgcggtgactttgccggcctcaatcgtagccgtaatgtcttttaagatggtttgatctgttttgtagccgaatgagacttgttcgagcttaatcggctgatccgcgttttcaatggcttttccggtttggatatcttcttctttttctgcaagaatatgaatcatccgttccgttgcgccgacggatttttgaagctgtgtgaaaaatgaagtgatctggcccatcggcataatgatctgaaacaaatacaggataaaggcaacgagtgcgccggctgtcaattcaccggatgacacctgcatcccgccgtacccgatgacagcgaccagcgccgccattaatacaagtgtaataagcgggcctacgagcgactgcaccttcgcctcacgcagcccgagtttaaagagtgccatgatgcctgcttttccgcgtccgtattccgcttcttcagcgtttgacgcttttacaagcctgatttccgggaggatgtggtttaataatccggtgaatctcgccgtttcatcctgtgtttcccgagaaattttaaacattttccggccgatcggcactaaaatcaccgcagccagcggcacgacgatcagcacaagcaatgtgagcttccagttcatgaaaaataagatcgtcagtgacccgataacggaaatgattccggtaataaatccgctgatattgtttgtgatcagctcttttaccaccattgtgtcattggtgacacggctgatcgtttctcccgtggcgtttttgtcaaaataagagacgggcagtttaattaatttctgccacaacaaatcacgcagtcccgagatgattttctggccgctgtagttcagggcgtaggtggcgtaggcgcttaatgcggcctgtacgataaacacggctgcgatgattccgatttgcacgcctgacagcgacgacatggaaaagccgtcaacgagctgctttgtcaatagcggaatcagcaggctgacgagcgttgtcacaatactgagagacagcgcgaaggccagcataccgtatgatggttttgtttttttgactaatgaaaagaatgagctgaatttccctttaggttttggttgtttattcggcatatgttttcctcctatatcactgtttatactataacggatgtgcatgaacggaatatgaacaaaacgtacatttttgacaaaaaccaaaataaactctattagtcaatattatcaaattcacctgcctccggttgcggaaataaggaatatttaattgaatgtttaagtttgacagattaaaaacctcacggatctctccgtgaggtttgttttactcagatgctgaatggcgttttgcaagaacgtcaagcacgtcgtccaaaggaagcgactgcgcacgcagaagaacgagcaaatgatacagcagatccgccgcttcccattttaattcttcatggtcccggtttttcgcggcgataataacctctgcggcttcttcgccgacttttttgaggattttatcgacgccttcccgaaacagatacgttgtgtaggctccgtcaggcatctccgcctgccgtttggcgattacgctttccagttcatttaagatgccgaaacgatcctgcgcgtccgctttttccgaagaaaagcagctgtagcttcccttatggcatgcgggtcctgaaggctccgcaagcacgacaagagcatcttgatcgcaatcatagcggatggctttcaccttttgggtattccccgacgtcgctcctttatgccacagctccccgcgtgaacggctgtaaaaccaggtttctttcgtttctatcgttttttcgtaggattcacgattcatataagccagtgtcagtacttctttgcttgccgcatcctgcacgatggcgggaatcagtccggcctcgtcaaaccgcagttcatctgcccgtttcatctcacattcaccccgtgtttcttcatataatctttcacttcttttatagatgtctctttgtaatggaaaatggaagctgcaagcgcggcgtccgcttcaccgatcgtgaaggcttcaagcatatggcgcgcgctgccggctccccctgacgcaatgacgggcaccgggacggcacgtgtgacaagctgtgtgagcgtatgattaaagcctgttttctcaccatctgcgtccatgcttgtcagcaggatttcacccgctccccggctgacggcttcttttgcccaggccgtgacttcccactcggttttctgtctgccgccgtgtgtgtacactttatagcaatccgaatcttcatcatactttgcgtcaatcgccgctacgatgcattgcgagccgaaaaaatctgctccttccgtaatcagctcggggcggaggacggccgctgtattaacagatactttatcagcgccggcgcgaagcatccgtttcatatcgcttaattgattgattccgccgccgaccgtaaacggaatcgccagttttgccgcaacttgttctacgacgtctgtcatcgtcttgcggccttcgtgagaggcggaaatgtcgagaaaaacaagttcgtcagcgccctccctgtcgtaagcttcggccagctcgacaggatcgcccgcatctttcagcccgagaaattgaatgcctttgacgacgcggccttctttcacatcgagacacggaatgattcgtttcgtgatcatgcgtccttcaccccgctgagcgcttcggctaatgtaaattgttttgtatacagcgcttttccgataatcgctcccgatacgccggcgtctttgaagcgggccagtgctgtgaggtcggcgactgagctgactccgcctgaagcgatgacggtttttcccgttgcttttgcgagctgaacggtgctttcgatgttcggtcctgacagcatgccgtcagttgcaatatccgtgaaaatgaaggtttccgctccttcggccgccaattcacggcccagatcggccgcccttaccgaggatgtttccagccagccttccgtcgagacatatccgttccttgcatcaagaccgatcgcgattttgccgccgtattgtttcagcatgctcttcacaaatgccggatcggaaacggccgagctgccgagaataacgcgatcaacaccttgtgataaataaccgtacacatccgcttcagaacggatcccgccgccgatctcgactttgacatcaagctgccgcgcaatgtcaagaacatgcctgtcgtttactttcctgcctgctttcgcgccgtcaaggtccacgagatgaatccattcggcaccttcgtttgcaaattgcgccgccatgtctaaaggagagtcaccgtatatcgtttccttgccgtaatcgccttggatgaggcggacgcatttgccgtttctcatatcgattgccggatataatgtaaaagcgttcatttcttcaccttctgttccgctgccatttttgtaaattgcgttaagatcgccattccggccgtaccgcttttttccgggtgaaactgtgcaccgaagacattgcgtttcccgacgaccgccggaacacgaacgccgtactcagcgcttgccagaagatcgccgtcttccatcccgtctatataataggaatggacaaagtaaacgaagccttcttccgcttccgaaagcaaaggagacgtttggtgaaacgtcagccggttccagcccatatgcggcaccttcagcttgtttccttcggcatctctgtctttgagtctcacagcttttccggctaataaaccgagtccttttgcagagccgttttcggtgctttcttcgaaaatgagctgcataccgaggcagatgccgaggagcagcttccccttgtcaaccatacggtgtatgaattgatcaagcttcgcgctgcgtaaattgtccatggcgtcactgaatgatccgacaccggggagaataaaagcatccgctttttcaagctcttccggccggtctgatacgacatacgggacgccgacgcgttccagcgccttcgacacgctgaataaattgcccataccgtaatcaattacaccgatcatttacagcattcctttcgtagacggcacgcccttgacgcgcggatcaatggatgacgcttcgtccagcgctctgccaagcgccttaaacacggcttctatcatatgatgcgtattcgtgccgtaatgaacgatgacgtgcagattcattctcgcttcgagcgccagtttccataagaattcatgtaccagctcggtatcaaacgttccgactttcgcttgcggaaatgcagcgcgcatctcaaggtgcggccggttgctcaggtctacggcgacttgggcgagagcttcgtccatcggtactagcgctgatccgtaccgtttgatcccttttttatcaccgagcgcctccaaaaaagcctgccctaaacagatgccgatatcttcagtcgtatggtgatcatctatctccgtatcgccttttgcgtcaacagttaaattgaattgcccgtgctttgtgaacaaatcaagcatatgagtcataaacggcacatccgtgctgatgtcggcttttccttctccgtctatttcgaaagccagcttaatatcggtctcatttgttgttctggcgcgttccgcttttctcatcggtcattcctccgtttctcgcttcaatcgatcttgcgtgcgcttcaagcccttccagtctcgcgaaggcggaaatgctgtccgcgtgcgtttcaaatgccttccggctgtatgagatgatgctcgatttcttttgaaaatctgttacattcaacgggcttgaaaaccgcgccgttccgtttgtcggcaaaacgtgattcggtccggcaaaataatcgccgaccggttcagcgctgtatcgccctaagaaaatcgcccccgcgtgtctgatgcttccaagcaaagcctccggcgaatgcgtcatgatttctaaatgctcgggcgccagcgcattcaccgtgtccactgcatcttccatcgattccgtaatgtaaatgcggccgtgatccctgatcgacgcttcggcgatttctttgcgcggcagcgtctgaagctgtttattcacctcatctgatacggcttcggcaagcttccgtgagtcggtgacaagcacgcttgagctgagcgtatcgtgttctgcctgtgaaagcaggtcagcagctacttctttgggcaccgccgtatcgtctgccaggaccacgatttcactgggcccggcaatcatgtcaatatccacaacgccgaagacttcgcgcttcgcgagtgctacaaatatattgccggggcccgtgatcttatcaacaggctgtatcgtttcggttccgtaagcgagcgcggcaatcgcctgcgcgcctcccgctttgtaaatttcctttatgccgagctcagacgccgccgccagaacgcccggcgaaaggcggccgtcttttcccggaggactgacgagaacgatccgttccactcccgcagcgagagcggggatgacattcattaaaacggaagacggataagcggccgtcccgcccggcacgtatacgcccgcggaatcgagcgccgttattttctgcccgagcatcgagccgtctttgcgatggtaaaaccacgaggattgcagctggcgttcgtgatattctttaatattggcaatcgcctgtctgatcacttccaacagctgatcatcaagcagacggtacgcctcggtgacttcctctgcactcacggccatttggttcaggctgatgccgtcaaatgtttttgtataggccaaaacggctttgtcaccgttttgtctgacgtcttcaataatctccctgacggttttccgctgctcttcggttccgctgtcgatggaacgcttcagtgaaaaccgctcgcttctttttactgcggttattttcattgtgccgtttctccttccacaaccctggccagcctggccgccatttcgtcgattacatcatccttcatgcggtagctgaccggattgacgataaaacgcgatgtgatgtcacaaatatgttctgattcaacgagaccgttttcttttaatgtccgcccggttgatacgatatctacgattctgtcagcaagcccgattaaaggcgccaattcaatcgaaccgttcagcttaatgatttccacctgctcgccctgctctctgaaataacttgacgcaacattcggatatttcgtcgcaatcctcggggcgactccgttccaatccgctccgggaagccccgcaacggcgagatggcatttgctgattttcagatcgagcacctcatacacgtcacgctcttcctcaagcatgacatcctttccggcaataccggcatcagcgacgccatgctcgacataagtcgtcacatccatcggctttgccagaataaagcggagattttcttcaggaacgtcaatgatcagctttctcgattcttcaaactcctcgggcagcctgtacccggcctgccgcagcaacccggccgcttcttcgaatatccgtccttttggcattgccattgtgagtaccttacccattctgctcttcctttctggcaccgataaagtatgtgacgtttgcaaatgattttgtcatatgatcgatattttcaatgcccgccagatcctgcaggacgacttttctgcctctcgccctttcttcctccgcgaataaaatggcctgcgcccgctgctccttgctgaaaatcacggcgtccgcttcactagtttcttcctggatgccgagcgcttcaatcagcctgtcgatacggagcccgaaacccgtggcgggagcgggactgccgaaatggccgagaagattgttatagcgtccgccgcttccgatgacaaaaccgacatttgccgcatacacttcgaataaaattcccgtgtaataactcatatggcttaccatattcagatcaaggcgaatatgctcggcacatccgtaatcctcaagaatgtcccacaggtcttccagctcctgaatcaagctttgtccggagatgccgatgatctcctccgccttggcgcagatctctttcccgcctcgcaattccagaagtgcgagcagccggcttttgtctattgaagaaagcggaagcgatttgacatgttccctgtatcccacgtaattcttctcaaagagaaagcgccgcagaacatccgcccgctcagcattgcccagaacctcgacaaacagctcatcagcgagtccggcatggccgatcgcgattttaaaccggtgcaatcccgcgtttttcaaagcgccggccgccagcgcaatcacctcggcgtccgcgcttgttgatccgtcgccgatcagctccgcgcctacctgttcgaattctgccggacgtccgccttcccgctcctgagcgcgatagacgcttgccgcgtaccccgctctgagcggatgattgtgtttgtgcagcttagacgccgccaccctggcaatcggtccggtcatgtcaggccgaagcacaagcgtttttccgtcctgatcgagaagcttaaacagctgctgttcttcaatggctgactggacgcctactgtttcataaaattcaagggtcggcgtctccataaactgataaccccatttatcaattaaatccgtcagtgtggaacggacttttttctttgcttcgtataaaccgggcagcgtatctctcatgccatgcggtttctcaaacataaacatttgccttttacacctccgctttgtctgaaggaaaattccgaatcctttagttcgctaatatgataatatgttagcagataaaagaatgaattgcaacgcccaatgtccgcctactcttttccataaacatggctaaagaatgaacaaacctgtaaacatatcggaacgatcgaatcatattgagcagaagtgctataatacatagaatagcttcaacagaaacaagggagaagaattgataatgaagacgcttggaacattatgtgtgctgattctgacagccgtccttgtctatctgggatataacatctatacaaacgatattcattttaattttttcaatcagcagtccgacgagcctgatgagaaaacaccgttaaaagggagcgcgtcaccgctgaatgtcgttctgtacagacagatggattctcccagactgtacaatggctgtgaggtgacaagccttgccatgattttgaacaatgccggatatcatgtgtcaaaaaatacattggcggataaaatcaataaagttccgctcacatacagcagcgggctgaagggagatccgaatgaaggatttgccggagatatggaaaacggcccgggtttaggcgtttatcatgagccgattgataaacttgccaaagaatatgcgggaaacaaagtatacgacctgacgggaaaagacatttcttcagtgtaccgccagcttgaaaaagggcggccggtctgggtgattaccaccacatcctttaagccggttgataatatgcagacttggaatacgccgaacggaaaaatcgacattacgttcagcatgcatagcgtagccgttaccggttatgatcacgattatgtatacgttaatgatccttatggctataaaaacagaaaaacaaaccgatctgactttgaaaaagcctggaagcagatgggcagccaggccattgtgatcaagtcataaaaaaaccccgctgacgttaatcagcggggttttcccattcgttctttcatttcttcgtccgtatagatcacctgcatcggatttcctccgacaaacgccccggccgggacatctttgtgcaccagcgtgccggctgatacaacggctccgctcccgatggtgacgccgggcagaatcgttgtgtttgccccgatcattacctcgtcaccgattgtgacatcaccggtccggtactcatgtattaaatattcatgagccaaaatcgtcgtattgtagccgatgatgctgttttctccgacagtgattttttcaggaaacataatatccggcatcaccatcaacgcgaatgaggtttgttttccgacattcattttcaaaaaggttcggtacagccagtttttcacgcttaaaaacggcgtataccttgcgatctgaatgatgatgaaatttttcatcaccttcagaaagggaaccgtctgataaacatgccacaatgaatttgcacctgaaaccggatagcggtctgtttttctcacggattacttcaccccggtgatgtgcaataaatcactcattttctcaagcatataatcgggttcataggcggaaagcgtctgtgcgcctttaatcgtccacgcgacgccggctgttttcgtgccggcgttttttcccgccatgacatcgtgataattgtcaccgaccattatggcttccgacggatcgcacccaagccggctgagagcaagccgcacaggctcagggtcaggcttcggatgctttacatcatcaagcgtgacgacagtatcgaaaaacgccccgatgcctgtcagcttcaatcccatattgactgtatccctcagcttcgtggtgacaatcccgagctgatagcccgcttttttcaattcatccagcgtttcgtaaaccgtttcgtactccgtgacgagctcatcgtgcttttcatggttgaatgctctgtacatgctgatcatctcatcgcacttttcagcattaatgcctgaaaacgtttcatacagaggcgggccgataaacggaagcacatcttcccttttgaactgccccgggcaataatgatcaagcgtatgaagataagaagcgataatcagttcattcgtgtcaatcagcgtgccgtcgagatcgaataaaatggcggttacacgtttatcagtcatcttatgtcctttccgatttcagacgtcagtccgtatctgcataccgcttatcggcataccctttaacgcgtctgaaaaccattaaaataatcgcaagaacaatcagcacaatggaaatgacctgcgcgatccgaagctggctcgtaagcatcaggctgtccgtccgcattccctcaataaagtatctgccgatcgaataccagatcacatacgtcaaaaacagattgcccctgcgcaggttcacgcggcggagcagaagcagaatcacgacgcccgcaaaactccacagcgattcatacaaaaacgtcgggtgataatattgtccgtctatgtacatctgattaatgatgaaatccggaagatgcagactttccaaaaatgaccggctgaccgcttcaccgtgagcctcttggttgataaagttcccccagcgcccgatggcctggccgagcagaatactcggcgcggcaatatccgccagcttccagaatgagatccctcttacttttgaaaagacgattcccgttgcgatcgcgccgatcaatccgccgtgaatcgcgatgccgcctttccaggttttaatgattaccccggggtgttccgagtaatagctccactcgaaaagcacatagtatgcccgtgcgcaaatgattgcgatcgggatggcgaaaagaacaagatcaataaaaatgtcctttttcagcccccgcttttcactctccctcatggccatccaaagccctaataacgcacccgcgccgataatgatcccgtaccagtgcacggataaaggcccgagctgcaaggcaatcggattgattggtgttcctgcttcgttcatattattgccaactcctattcgtcttgttcgccgtcttcaatgacatccgccagcttattcgtgaattgctcggcagcatttaagcccatccgcttcaatctgaagttcatcgccgcaacttcgataataacggcgagatttcgcccagggcggactggaatggtcagttttgtaatttccgtatcaatgattttcattttttcttcttcaagtccgagacggtcgtattgcttcccttgctcccaaagctcaaggtccatgacgattgtaattcttttattgcttctgacggcgcccgctccgaacagcgtcatgacatttataatgccgagacccctgatttcaagcagatgctcaatcagatcaggcgcattcccgacgagcgtatcctgatcctcctgccggatttcgacgcagtcatccgcgacaagacgatggccgcgtttgacgagctccagggccgtttcacttttaccgacgccgctttttcccgttatgagcacaccgacgccgtatatatccacaagcacgccgtgaatggcggttgtcggcgcgagacggctctcaagaaaattcgtcagccggcttgacagtctggttgttttcagaggggatctgagcacaggcacgccgtttttctcggatgcttctacaagctccggcgggatcggcatatctctggaaagtatgatagccggcgtcacatcggtgcacagcgattccatccgctgttttttatcctcctcaggaagctgatcgaaaaatgacagctccgtttttcctaaaagctgcacccgttctctcgggtaatatgtaaaataaccggcgatttcaataccgggccgtgataaatcactcatcgtaatcgggcggttaatcccttcttctccgctgatcaattctaaatggaactgctccattacgtctttggtccgaacctttgccaagatatgttcctcctgttctgggatgttccgagctttgaacagttatattttatcactttaccgtctgaaccaaaacagatttatacaattccggcataactggtctagataactagtctgaaaaagagtaaaataaaactaacaactaaccagaaaggcgtgttttaaagtggctgaaagcttgttaatcagcggtgcggacatcgtaacagaagaggaaatcatccgaaacggttttctcggtataaaggacggcatcatttcttacgcggggaaaacaagaccgcaagaaacgtatgagaaggaatggaaggcgcccgcgggctcgtatgcgcttcccggaatgattgatattcatattcacggcggatacggcgcggatacgatggatgctgatattgcagctcttgatacaatgtccgcccggctgcccgaagaaggaacaacctcttttttagcgacaacgataacacaacagcacgaaaacattgaaaaagcgctcgtcaacgccaaaaaatgggcgtcttcctcaccgcaggcccaaaaaggcgctgagttgatcggcattcatttagaaggaccgtttgtctctccgaaaaaagcgggagcacagccgaaacaatggattacgccggccgatgccgggctctttcagaaatgggagcggcactccggaggtctgattaaaatcgtgacgcttgcaccggaagaagatcctgatttcagcctgatccgttatttaaaagaccggaacatcatcccgtcaatgggacacacagacgcgggagccgatcttttacaaaaagcggcggatgccggggcggtgcatatgacacacctcttcaacgccatgagctcctttcatcaccgtgagccggggggcatcggtacggctctcgcctgcggccgcatcacggcggagctgatcactgacggcattcattcccatcctttggccgttaagcttgcctatttggcgaaaggaagcaaaaacctgatcatgattacagactccatgcgggcaaaagggcttaaggacggagaatacgaattcggcggacaaagagtcaccgtttgcggagacaaagcgcttctctctgacgggacgctggccggttccattttaaaaatgaatgaaggcgcagcgctcatgcgcaggtttacaaactgctcatggctggatatagcaaatatgacatcggcaaatgcggcccgccgcctcggcatattcgaccgtaaaggaagcatcgccgaaggaaaagacgccgacgttgttctgacggacggacagtgcggcgtgctggccacgatttgccgcggaaacaccgcatatatctcaagggaggctgattggatatgaacgttatcacatgcagacattatgaagaattaagtgaaaaagccgcagcgattatcgctgaaacagtgaaacaaaagccggatgccgttctcggccttgcgacgggaggcactcctgaaggcgtatacaaagaacttgtgcggatgcaccgctcagagggcttgtcattcggggatgtcacgacaatcaaccttgatgaatacgccgggctttctcccgaggacaaaaacagctatcattattatatgaatacacatttttttgcacatatcgacagccgaaaggaccgccactttctccctgacggacgggcagacgatctcgatgccgaatgcggacgctatgaccgattgattcaaacactcggcggagcggatatacagcttttaggcatcggacacaacggccatatcggctttaatgaacccgggacgccatttgaatcccgaacccatgtcgttgagctgaatgaagagacaagacaggcgaatgcgcggtactttccgtcaattgatcaagtccctgtaaaagccctgacaatggggatcgggacgattttgtccggcaaacggattttgatcatggcatccggaaaaagcaaggcccaagcggtgaagcagcttctggacgggcgcatcagcgaagcattccccgcctccgccctgcacgcgcatccggatgtgacggtcttgattgatgaaaaggctgcgggcggcgattgaaaggatttgacctatgcagattgataaacaatctccgattccgatttactttcagattatggaacaattaaaaacacaaatcaaaaacggcgagctgaaagcggatgcgctgcttccgtcggagcgggaatacgccgaacaattcggcatcagccgaatgacggtgcgccaggcgctttccaatctggtgaatgaaggatttttatacaggcagaaaggccggggaacgttcgtcagcaaactgaagatggaacagccgcttcaagggctgacaagttttacggaagatatgagaagccggggcatgaagccggggagcagacttgccgaataccagctgattcaggcgacggaagaattatcttctatcctgggatgcggctatcaggcaacgcttcataaaatcatccgcgtccggctggcgaatgatatcccgatggcgattgaagcctcgtacattccgtttgacaaagcgggaaaactggacgcctctcattttcaatcatccatgtatgagcatattgaagcgtacaatcagatgccgatctcacgggcaaaacaagagcttgaaccgggagccgcttccgaggaagaagctgagctgctcggtatccagcccggcgcccccgtcctctatatcaagcggaccacttatctgcaggacggcactgcctttgagcacgtcaaatccgcctacagaggcgaccgctacacattcgtgcattatatggacagggtgaaatgaaacatctccaaccgttacgggttggagatgtttttttgatctgccattttcaaatcaagccggggaatgttctctatgactctgtcaaaacggagaggctggggttctgatatctatttttataaagaaaagagtaataaaatgctaccctctgttttggacaatatacggaacctgctttgaaaccagcagcagcggttctttgtttttatgagccagtgaaaacatgattgcgccttcaatcatcgagttgattgtcaccccgagcttctccgcttcctcttgttcaaacccatgttcaagaaattttgccgcaaacacatccgtccacttcttgaacacctcaacacatgtgcatcttaacgtttcattgatcagagcggtctcacccgccagcaatccaaccggcacgccctcaatattctgcggatcattaaactgttcagccgttacatgaataaagtgctgaatcgcttctatagggtccgcgaattgagacatactattctgtatttgcttttcaacgcatcttcccgtatatttgatcgccgcaatggcgagttctgcttttccatttggaaagtgatgatacacagaccctctgggtgctccgctctcttttataatttgattcaaaccagtcgcatgatatccctgaatctgaaaaagatatgcagaggtttgaataattctttcttttgtcccggttttactgttcattatgtttcctcctgcatattacgaaaaccaatcgattttagtatagaaaagggacataaaaaagtcaaaagcacttagtaccgccatgcatgttacagaaaaaaacctgctgaccgtcagattttcttctgacgatcagcaggctgtatgttttcgttatgggtttgaggcatgcctgaaatcaaactgatccggagccgggcgatacggcgtatttcccgttttgaacatccacagcggtgatattgttttgccgttgtacgggtccttcacgacggtgtaccagtaataaacggaatcaggctgcaggccgtcccagacccaatttgcggtttttccgctttttacgtgttttttatgaccgagcagttcgttcgtatagacgttgcattcaaaataatcggtcgctacccttttcctcttcggctgtaaatccatttctgctgagaattcgtctttatcagcgaacagatcggtgtcatagtaattgatgtcatccgtgtacggcgagtaggagaacatgtgaacctgattggcggcctgatcgaattgcatcatgcgcataaagccctgccccccttccggaccgtcctggtagtcggtcagaatttggtggacgaggcggtccggttttccgtccccgtcatcgtcaagcgcatcggtttttttcatggcgttatggtaatggccgcttaataccatcgccacattgcgattcggcttgacgacttttcgatagatcgtctccccgatcgggcttcgatttccgctcacaagcaagtactcatgaaagcataagatggcggttcggtccggatacctcttcagcacttgattgatccagtcaatctcttgttccgcaatgccccagcccatataaatcataataaaatcgttcccgcttgccgacagcagatcataatgcccgcggttatttttgtatgatccgccgtaatgcatgttctgttcaaaccggcggctcccgaagaaatccccgaatgttcggtatgtgccgtctttatggccgacgtcgtgattgccggcaagcactccgtacggaattcccgccttgtcaagtgtccgcatggagtgatcggcgtttttccactgtttcatcaccattgaatcatcgacgatatcaccggtatgaaagacatatttaatattgtgcttttccttattttctttgatccactccgtcattttgtcaaaaatgtgcgggtgcccttgtgcgtaatactgtgtatccgacatccagataaacgtgtaattgcctttcgccggtatttgatcctgcacgatgacattcatttttgagttcttcaccacatccgctgcggaaacggcggcttttaatgtaaacggctttttatctttggcaagaacgctgtccgcctcctgccagcggcttgtccggtaattccaaatatacatggttacctttcggccgggcagagagcttcctttccagaccgcctcagccagatccgtttcgtcgatagacgggtcaacggagacttcgaaccggtgataaggaaaacgctccatactttccgccgatacggtttttccgtcatttgccgagatgcggttcatttccggcagggtaaacggcatttcattttcttttatgcccctcggcggttccgttaatgaggcgtgtttatacactttcacgctgcccggattccgcgcggtataacggaagccgcgataaaatgatacattcatgtcatccttcgtcgggtcttttacccggacggacagctttgctttgtgggcgccgattttttgatcggcaagctccggctggttcggctcctcccgtttgatatggaaggtgcggacggacgttgtttcatttccggcaaggtctgccgcaataattgtaagggtatgttttccgggcttaagatcggctgatgacgtgtgatgcgggagcgtaatgctttctccgtccaaaaacgctttgacctcttccactttgctccatttgtcacggatgtccgcattcagctcaacattacctttcagcgccgcgccttctttgatacccgggacaatcttcggccctgtattgtccacccgcacagattggctcagctgctcctcaccgtcgctaacaaaaatatggtgatagccttcagaaagcttcgtcgtgttccacggcagcagccgtgacgtaaacaaatgatccggcaggctgaatgagaaggtcttctgctgattcgcccgcctgccgtcaccgataaagagctgctcagccggatccgtcttcccgtctttgatcaccgttccgtccgaaagcaccagacgggcatgtttcacgacaaaatcatcccgattctctcccgtgtcatacggagaaacctttgagcccgaacggatggatactttctgcgttttgccccctttttgcagcagacgttccggaaggagaaccgagtgcgttctgtagcggtgagacggatcgtcaaaaatgtgcagcacctcattttccattatgacggtgttttgaaaataaagattcgttttccgggcatcgaaggcgaaatagacctctttttccagcgccggccgggtctcctgccgcttgccgtcaatccacagcttgatcttatcggcgctgacgtcggaagtcgctttgagcagataggtgccggatatcgtatcttcgggttcaacattcattctgagtccgtgtgatttgctcgtctgttcaatgtcaatcattttgacgggcgtttttgcttcattttctccatcactggctgcgatataatactcaagctgatcctggccgagcagttccggggaataaagaatgtgatggtataagctgtcgttgcggtctttttcggccagaattcgtttgaatggttttttctcattggtccggtaataaaacgcggctgttttgacaaggtttttgtcttttatgtcagcctttaattcaatgctttcagcgggccggacgggctttctgtctgtaaggtcttcgatgaccggtttttccttgtcaggtttgatcacccttttctgctgcgggatctgcgcctgaaaaacagagcccggtgacggcttatgctcgctcgtggagatcttcagcaattctcccgttccgttcagcggatatttgtacagcaaagaagtcagccggcggaaagcgtgtttccggtaatgcgctgaggcgataccctttccggtatttgccgacagcaccaccgtacgcgggcggccgttggacattccgtccgtcccttcgatgacggcgagatgttttccctccttcaggcgtgtcccgtaatagcggttgaaatcatctatcgtcagttctgatgcggcgcgcctcagccaaaacacgtaagtcccgcctgacggaatgacggtatcttctttcggcctccatatcatgtctgattccggcccttccttcggatagcggtagcggatatggtagtctttaaaatgaatgggcctgtccgtcgtgttatacacctcgataaattcataggcatcagcgccgtcttcatttttcgtatcaaccgcaagctccgtaatcatcagctcgggaatatgattcaaatcggcttgatagccgtccagcttcagcagctttttctccgattccgcccgctgtctgccgttggtgaaaacgaggtaatattccaattctccattccagatatcccgttttgaaacctgggccgtaaacagccggattgcgcctggcgcgggctccatcggcaccattttaaaccccagctcattgctttgtttataaaaaagaaacgccgaaaacgcttgatagtcagcattccgtacatgagcctgtatgaacaggtttcttttcatttccgcctttacttcgatttggggaggattctccagaagcggtatgtaatgaggcggctgtccgaattcctgctgattcacggggattgccgattctttgcgcgccgcatccgcagaaggactcacacaaagcaaaccaatcagaaaaaagagcgtcatcacaagtttcatctcattacctccctatgcattatgttgcgtcaggaggctgccgcttatgtaaatcacacataaaaaagctgccctctcgggacagctcgttttttacctttttctaagcggctccaatatgcctttttggatcagcaagtggaaaacggacagcacgacagacgcccaaatggcggtgccgaacccatcaatctgaaagctgtctcccatcaaggctgcggtcatcattaacgtaatggcgttgatgacaaacagaaagaggccgagggtcacaaccgtgacgggcaatgtcaatatgacgatgatcggcttgatcagcacatttaacacagaaagaatcacactggcgatgacagccgctccgatactgctgatatggacggaatcaaaatatcccgcgataacgattaataataaagcatttactaaaatgctgactgcccatttgatcatttatttcaaatctccttctaaaggtacaacaaaacaccagataatatatacaatcggcacgattccgctcgtgacaagcgctaatacaacagtgataatgcgcaaaagcgacgcatccatattgatgtactccgccaaaccgccgacgacgccggcgattttacggtttttttctgaacggtaaagtcttttcatccaatcacctctgagtatgcttgagcttaatggctcctgttaacgattctgagaaaatcgagagatgctgatcatggccttgatttgatgccagcatcagttctttttgaatggtatcattcttttcctttaaaatttccgcatcaatcagctcatggctgagagagccgagattgcttttcagctccgctttcaccgccgaatcatcaggcagagcgatctccacgtttccggtcgtcgttttcgtgtagatggagcggcagtgcggcgctgtcacggtaagcatgatattgccgttaaagctttgaacgtcaatggattcactcgatccgcgcaaatcaatcaagccgttgatcgtttccgcttcaatcgcgccgcattgatgtccggccagcttgatttgtccgttagccgtttccgccgacgctttatcagccgtcaaatgagagaatgacagaacgccgtttgtcgttttcgccgagaattcttttacatgtaaatgttcccctctgatcggtccgttaaacagcttcactcttatcttatcgtactctttctggggaacataaagcgtgacattggttttcatcgttttcttttccgtgcggacaaaaaacttattgcccttcacttcacactcaatgtgctgaagaaatgcggtgcgcgccgcctcctgactgtccgcccggtacactttcgcctggcactccgctctgatatcttcatccgcccacggcacgatattgacgctgccgtttgcgatctgcatatcaatggccgagaattcactgtctttaaattgaaaaatatgctgcacttcgtgtgcgtggccgaaattcagatcaagatccgcttccttcacttttttgacggcagaatcaatccagtcgaacagcttcgccccgagcgacggcttttggcttccttttgccccgctttcgaaatcttccgcaggttcctggacctctgcagataatgcggtgatctgctcttctttttctttatattcatgatccagtttttcaatgagcgtcagtgcttcctgcgccgtcagcatgccgtcttccacaagctttaaaatccgttctttctcctgtttcatacaaaacgcctcccccgacttttcttacacctggcgtaacaccttaattccctgcacgatattccaaatgaccattccgatgaggatcagaaaataaacagctgctcctgttatcataacaaaaacgggcaccatactctccccctgagccgtaatcaatccgccgacaacacccgcggtcacaatcagcaatcccgcaaacggaatgatatgggaaatcagagcgcgcatggcatgccgcttcgtctctttttcatcgacgacaaagtaagccacaatcggaagaatgagcggcgcgagaaacacgctgaaataacagattgatgcgataatcgcttgatttcggttcaataaaaacactccctgtgccgtaatgtaaaaacccttccttatacatacgtatgacgcatgggcgggtttcattttcatgctaaggacatgcttcgttatacgtaatttttgatttcagagatttcactatagaatcttttccccgaaccgattacaatatgtaacaaagcctgaccgtatgcaaggaggacatacaaatggagaaagatcccgaaaacgcccaagtaacggaagagagtctgcgaaatttaattcgcgaacagaaaagaatgaacagcgaaatgctggctgaattggaacagatcaaagcagcccctcttcccatttcccatgatatccaatatataaaagtgctgctggacagcagcagcacccatattctgcaggacttaatgcatttaagcaaacagcttccccaacagaaaaaagcctgtaacacaacagcccaaaaccggtgagttttgggctgtttttattgatctattatgtggctgccgtttctttttcagccagcaatgttttcatccgttttttatcacgttccattaccggtttcagatagcggcccgtatatgattctttcacttccacaacttcttcaggcgtcccggaggctacgatcgtgccgccgcccgctccgccttcaggtcccagatcgacgatgtagtccgccgttttaatgatatcgagattgtgttcaatgaccaaaacggtatcaccgttatcgacgagtctttgaagcacaaccaaaagccttgcgatatcatcaacgtggaggcctgtcgtcggttcgtccaaaatatacagcgtccggcctgtggaacgcttatgcaattcggaagcaagcttgacgcgctgcgcttctccgcctgacagcgtcgtcgccggctggccgagcgtcacgtacccgagtccgacatcggcaagcgtttgaagcttgcgtttgattttcgggatattttcaaagaaagacagagcatcttccaccgtcatatccagaacgtcagaaatgctttttcctttgtatgtgacctcaagcgtctcccggttgtaacgtttgccgtggcacacttcacacgggacgtacacgtcaggaaggaaatgcatctcaattttgatgatgccgtcgccgcggcaggcctcacagcgcccgccttttacattaaaactgaaccggccttttttatagccgcgcacctttgcttcatttgtctgcgcgaatacatcgcggatatcatcaaacacgcccgtataagttgccggatttgatctcggtgtccggccgatcggcgcctggtcgatgtcgatcaccttatcaaggtggtcgaggcctttgatttctttatggcttcccggtttcgctttggctttatgaagcttttgcgcaagcgccttatgcagaatttcattcacaagcgtgctttttccggaaccggacacacctgtcaccgccgtaaaagtgccgagcgggaatttggcgttcgcttttttcaggttgttttctgaagcgcctttgatttcaatgaaccggccgtcaggctttcttctctccggaggcatcgggatgaattgaacccctgacaaatagcgtccggtcagagagtccgcatcattcatcacttcttcaggcgtccccgccgatatgacgcggccgccgtgaatgccggcgcccggaccgatatctatcaaataatcggcagccatcatcgtatcctcatcatgctcaacgacaatcagtgtgttgccgagatccctcatgtttttcagcgcgctgatcagacggtcattgtcacgctggtgaaggccgatggacggctcatcaagaatatacaggacgcctgacaaacgggagccgatctgcgtcgcaagcctgatgcgctgcgcttctccgcctgacagcgtgcccgccgcccggctcagcgtcagataatcaagaccgactttatctaagaagctgagccgctccacaatctctcttaaaattaaatcggcaatctgcatatctttcttagacagcgtcaggtttttgaaaaattcaagcgcgtcgccgacggaaagctccgtaatggttccgatatgacgcccgttgaccaaaacggcaagcgcttctttcttcagccggtagcctttgcacgtcgggcacgatttctgtgacatgtactgctccatctgttcacggatataatcggagcttgtctctttataccgtctctcaatattgcgcagcacaccttcaaattcaatttcattttcgcgcacttgtccgaaatcattctcgtatttaaagtaaatccgttcattgccgctgccgtacagcactttatcaagctgatgcttcggcaggtctttgaccggagtctccatatcaatgccgtaatggcggcagaccgtctgaagcagctgcggataatattgtgaactgatcggcgtccacggcgcgatggcgtgttcctttaatgacagctcgggattggggatgacgagctcaggatccacttccagcttcaagccgagaccgtcgcaagtcggacaggcgccgaacgggctgttaaacgaaaacagccggggttcaagctccccgatagaaaaaccgcacagcggacaagcgtgatgctcgctgaacatcagctcctcctgaccgatgacatctatcatgacacggccttcccctaaacggagcgcggtttccagcgagtcggaaagccgggcggcaacgccttccttgacaacgatccggtcaatgactacttcaatggaatgctttttgtttttttcaagttcaatatcgtcagaaagctcggccatttctccgtcaatccgcacccttacgtaaccttgctttctgatttggtcaagcactttgacatgggcgccttttctgcctgaaatgatcggcgcaagcacttgaagcttcgtccgctccggatattcaagaatccggtcaaccatctgttcaatcgtttgcgacgtaatttcaatgccgtgctccgggcagtgaggcttcccgactctcgcgtacagcagccggagataatcataaatctccgttaccgttccgacggttgaccgcggattgcggctcgtcgttttctgatcaatgctgatcgccggagaaagcccttcgatcgcatcaacgtccggcttatccatctgccctaaaaattggcgcgcataggcagaaagcgattcaacataccgcctctgtccttccgcgtaaatggtgtcaaaggcaagggatgattttcccgatccggacagccccgtcacgacgacgagctgatcccgcggaatcgttacatcaatgttttttaaattgtgcgcccttgcgcctttcacctcgatccggtcaattgccatgtgttcatcatccttccgctttaagctctaacagtaaatcacgaagctctgccgcccgctcgaaatcaagcgctctggccgcttctttcatttcgtgctccatttgctcaacgactttctggcgttctttcttcgtcatcttcgccagtttaggcgcggcttttgttttatattcttctttatcctcagcggcctgcgtcgcgcggatcacatcgcggatttccttattgatcgtttgcggcgtaatgccgtgaatttcgttaaagcgctcctgctgttcccggcggcgcttcgtttcattaatcgcgatttccatcgaatttgtgattttatcggcatacatgatgacgcggccttccgcgtttcgtgccgcccgtccgatcgtctgaatcagcgaacgttcagaacggaggaagccttctttatccgcatcgagaatggcgacaagtgacacttccggaatatcaagcccttccctcagcaggttgatgccgattaacacatcatgttttccgaggcggaggtcacggatgatttcaatccgttcaagcgtcttaatctcggaatgcagataattgaccttgatgccgatttccttgagataatcggtcagatcctctgacatttttttcgttaaagtcgtcacgagaacgcgttcattccgttctatcctcgcctgaatctcgccgatcagatcatcaatctgtccttcgatcggacggacgtcaatgaggggatcgaggagtcccgtcggtctgatgatctgctcgatcatttccggcgtatgctcaatttcatacggtcccggagtcgccgacacgtacacgatattgtgcatgtgtttctcaaattcctcgaatcggagcggacggttgtcaagcgctgacggcaggcggaacccgtgatcgacaagcacctgttttctcgcctggtcaccgttgaacatgccgcgcacctgcggaatcgtcacatgtgattcatcaacgacaatcataaaatcgtccggaaaataatcaagcagcgtatacggcgtagagcccggcggacggagtgtcaaatgtcttgaatagttctcgatccctgagcaaaaacccatttcccgcatcatttcaagatcatatctcgtccgctgctcaagccgctgcgcttcaaggagcttgccgttttcgtgcatgactttcaagcgctcctcaagctcctgttcaatattcagaatcgctttttccatcttttccgcccgggtgacgaagtgggaagccggaaaaatcgcgacatggtcacggtcgccgagaatttctccggtcaaagcgtcgacctctctgatccgctcaatttcatctccgaaaaattccactctgatacaatgttcgtcacgggaagccgggaatatttccacaacgtctccgcgcacgcggaacgtcccgcgctgaaagtcgatatcattgcgggcatactggatatctacaagctttctcagcagctcgttccgctcaatctccatttccggtctgagcgacacgaccatttcccggtattcttcaggcgaaccgagaccgtatatgcatgacacactcgcaataataatgacatctctccgttcaaacagagaggatgtcgcggagtgtctcagtttatcaatttcatcattaatgcttgcgtctttctctataaaagtatccgtttgaggcacgtatgcctccggctgatagtaatcgtaatagctgacaaaatattcgacagcgttgttcgggaaaaactccttaaactcgctgtacagctgtccggcaagggttttgttatgggcaatgaccagtgtcggtttattcacttctttaatcagattggacacggtaaaggttttgcccgtccctgtcgcacccaggagagtctggtgttttctgccttcctgtatgcctttgacaagcttctcaatcgcttgcggctgatctccctggggctgatatttcgagactaactcaaaacgatctttcacaaaaaagcctccgtttctttacgaaatcttcctattgatatagtaacacaatgacgggcaaaatcactaaaaatacgaactaaagttcgatggtttatttttaccaagtcaatttttgtataaaaaacctgcttttatggcgtaaaagcaggcattctatttcatattcaccatgtcaggcattgtctttctttttgtctgcttcttttttggccatgtacagccctccggccaccagcgatacgacatccaatccaacgataaaatacgtttcggtgtaaccctttaaataggatgcgaaaagcagtgcggctgtgagagcgatcgccacatagtggttaaacgtgacgcgcgtaaaaaggacgaccagcataaaagggaaacataatgcaaaaacggcttttgtaatcacaaaaaccctcctcgggaattcttcatctcatctgattatagtaaaaaatgaagaatcggacaatcgttcccctgctatcacaataccctttttcagcagtcttcaatcatctgtcaaaaaaaatgtgaatataaatccattgaaccattaaccagatgaaccgaattacctttcttcagccgaaaggatgagaaggtttaggtctttgtatctttgacagtttcttcctccctctttacaatgtaatgatagtgtttactatcatttttcttggatgaagaaaaaaagggggtcataccgcatgtattcagtgcgatttcaaaaagcggaagaatcgagccgctctgcaggagcaaaaggaatgaacctgattaaactgacgaaaaacgggctgcccgttcccggcggtttcatcattcagacgaatgccctgacacgttttatggaagacaacgggcttcaagcagatcaggaacagatggagcgcgccattatgaacggcacgttttcaaaagagcttcgggaggaactgaccgcgtcgttttatgaattgagagaatcatacgcctctgtcgccgtacgttcctcctccgcgtccgaagatcttgaaggggcttctttcgcgggccagtacgaaacctatttaaatatcaaaacagaagaagagtttctcggaaaagtgaaagaatgctgggcttccttcttctcggcgcgggtcagcggttataaagagaaaatgaacaatgacaccgcagaaccgttaatgggcgttgtcgtgcaagggcttatcaattccgaggtttcaggagtcattttcagccgcaaccccgtcacgcacgatgacggagagctgatgatcagcgcgagctacggtctcggagaagcaatcgtctccggcagcgtgacgcccgacacatttatcgtcaataaagacacatttcagattgaaaaagaaatcggcttaaaagaaatgtatatcgtttctaaagacgaaggcgtgacggaaaaagagacgaccgctgacatgagaaaccgcttctgccttgatgacgagagcatcaaagagcttgccatgctgacgataaagacggaagaactgtacggttatcccgtggatctcgaattcggatttgccgaaaataagctgtatctgcttcaggcccggccgattacaacgatcgcgcaggatcagaaagcggcagacgaagaacgggaatttatcatgacgccccgggatcagaaagagttttggctcaatatggaggccaatatagaaggccccgtcagcccgttattcgcctcactcattgtgccggctttggaatacggcctcaaagagagcacgaaggcattccctgtaatgggcatcgaaatcgagcgtgtcaaacttcatcagggccgtgttttttccagacagcataagacggacgacaagctgcccgcagaacagttagaagcgcttttccccgtcttggctgaccgcatgtacgatattattcaggaaacctttctgcctttttatcaaaagctggacgaactggcgcatacagaccatacgccggagactgcccttaatgcgttccgaaacctgcaagacttctatttaaaaggatacgcagaacatttcaatattgtctttccgcaggttgcgttaaacatgatactggaatccatgtacggacaggttgagaaagaaaacacctcccttctgtacgaaatgctggctggcgtcatgaataagtcattggagaccgacagacagctctggctgctgtccggacaagtaaaagacagccctgagctgcggcgcgtctttacggtttctcatgccgatgagctgcatcagacgcttctgcaatcaaataagggaaaacgctttctcgaacaagtcggtgaatttttacaggaatacggctggagatccgtgaaaagtcatgatctgattgaacaaacttggacggaaaacccttatttcgctttggccaacattcagaactatgtccggaacggatacgattttgacagtgagtttcataaaacgatagaaaaacgaaaacagctctacgccgactttatggatagaattgaagatgacggcttccgggagacgtttgaccgctattatcagtggacattgtcttcatccgtcatcaaagatgatcaccatttttatattgatgcgatgctggacgccaaagcacgcctttgccttctgaaaatcggcgagctgcttcaaaaacaaggcgtaatcgatgatcgggaggatatgtggtacttatacagcgatgaagtcgagaaagcgctggcgtcgccggttccgatgcaggaaaaagccgctgaacgaaaacagctcttccagcaatatcaattgcttgaagcccccgcttatctcgggactccgacttcggaacagctgaaaatggctgaacagattaccggctccatcacagaagatgaaaaaaacactgaacatcaaatttacggacttgcggcgtcaagcggaatcgcaagcggcccggtgaaagtcattcgtgacgcaagtgaattttcccgtttttcaacaggagacgtgcttgtctgcaaaatgacgacaccgctgtggaccagtctgttccaggatgcaaaggccgtcattacggacacgggcggcatcctgtcacatgcggcgatcatcgcgagggaatacgggctcccggccgttctcggcacacgtgccgcgactgacaggctcaacgacggagatatcgtcacggtggacgggacaaacggcaagattacgattgtcaaacgcgcttcatgctaggtttccctctttattgacgggcagggcgggtgtatacttgtcctgccagtatttacgcgaggtgaaacacgttgagaacgacgaacaagagaattattgacgccgcgatgaatctgatcatccaaaaaggataccgcgcagcgacaacaaaagaaatcgcagaaaaagcaaaagtaagcgaagcaacgattttccgtaattttaaaaacaaacaaggattaatgaaagccatgattgaacagcagacgccggttccggaaagcatgatcaccaaggcggaaggcgatttgtatgaggatcttcttcatttcgccgcgacccttcttcagcaattggaacaaaaaaaagaagtattccgcatctgcctgcgcgaaccggaactattcgaagacgtcctgcaggatattgtcgtatatccgcaatccgtgaaaaagcatttaatcgtttactttaaggagctgacaaagaaaaatatgataagccccggcagcgaagaagctaatgcagacgtctttatgacgatgattttcggttattttatacaccggctgcagctggggaaaagagtcatcactctctctgaggaaacgatgctgaaacacagcactgagattttcatgaaaggcattaccggccggtcattttccggctccaaggaggatgaaggatgggttcaaagaaagaatgggcgctgatcgtttcgcttttgctgggagccatactcgttcccatcaattctacgatgatcgcagtcgccctttcatccatttcccgctcattcagcgaatcaattgccagcatcacatgggtagtgaccgtgtatttaatcgtgatggccgtgacacagcccattgccggcaaactcggtgatatgtacggaaacaaaaaaatgtatttatggggcgtcggcctttttctcatcgcatcattggggtgcgccctctcgccaagtcttttcttattgattttcttccgggcgcttcaggctgccggcggcgctttgcttacgccaaacagcatcgccatcatccgccatgtcgtgtctgaaaaacggcttccgaaagtattcggctttttcggcctcggtgccgggctgggcgcggctctcggtccgtttatcggctctcttttaattgagagcttcagctggcattcgatcttttgggtcaacattccgtttcttgcaatcgcactcgtgacggcattagtgatgtttcctaaatataaagaagaaacgtctgacgctccgcttgatatcatcggttccgttttgcttgccggaagcattgtatctattattcttctgacgaaaaatgaaagctctttgggctattgggtgtacgcactgctcattctcgtatttgttccgctatttttcaggcgggagctgcgcacgaaacatccgattattgattttgatctgtttaaaaacacgacctttacgagcgccaatctgtcggttctgttaagcaatttaatgatgtacgccgtgttattgattatgccgctctttatgaccggccacttcagcatgaacacgtcgcacagcggcatggcgctgtcagtcttttctgttttcatgtccgccagcaactggggcggagctcagctgcatcagaaatggggcgcgcgaagaatgatttttctgtccttcgggctgatggccgtagccaatctcttattttttcttttggtttattcccattccgttccgtttcttatggcatcgcttattgtcggaggcatcgcgtcaggtgcggggctgacgagcatgcaggtatcttctcttgcgacggtagaaccgggcatgtccggcatcgcatccgggattttctccaccttccgttatttcggaagcattatttcttcagcgctgatcggtttaatctccgggtttcatattctgtttatcatattgatcggagtttctgtgatcggcttgttcgtatcgcttggtatcaagtccggggaaaccgttcagacgaaaaaaagccattcggcataacgaaaaaggttccgtaagcatctgctttccggaaccttttctagttttccttcttcattttctctctcaaagtgtcaccgcaatgccgtttgctctatgagaatcttttgatttacaagagaaaaggggaatgtaaatggctgagagttccgatcaagttcggcgctgacatcgtaatccggccgtaaaaaaaagcccggccgccgtgttgttagcggcaccaggctttttatatgtgatttttcataattaataaaactgaaagcttattatttccaatgttttttcttaatttttttcataattctccttactaaaacctacctaaaacaattattgaatattacttttataattaagcaaattaagtaacaatcattgaaggattctcagactgataaaatttattttaaatataatatttcaaaacacattcaaactgtacaaagaaaagaaagtctaaatttttatttttgtgagattcatctatagaagccactgttttgatcctccttctaaagttgagtcgcgtcactttagtagaatcataccgtggcttcccttgtcaaaaggcacagttcttttttacaccaactacttgagactttaacgtttctctcatttgaattaattcaaaatagaattaatgggggagattacccccgtatttccaggcgatccaggtgggtggcctggtaaatattttaagtctctgtatctttaacaatagtatttacaatatcattaggataccgattcaaaaaaaaatgttctcctttaaacttatgaaatttcacgtttccttcaacaacttcactccatttatgcatttcattgatatgagtcgaaaaatcgctatccgcataaaaaacgcttactccacaacttattttttctgctttgggctgaaacttataattgtccaaaattataaaatctgctcgcaaaatcggaagaaacatatccataatctcttttgtataaaactcctctggtattcccccatattgttccacctttgtcaagaaagtttcattagtcatattttcaatgtcttctctcttttcaaaaatatgtggagcatctcgcccagaaaaaaacagatgccttggttccttagttcccatttgcttaagtttataatatatctcataagtcaataaggctcccatgctgtgtccaaatataacatattcatcgtcatattctaattgttcacttattcttttggcgatatcttcacttgcttcaccaacagactggtaacaaggctctgtgaatcgagttcctcttccagccaattcacatatacacaattcatatctatccggcagcagttttttccattcataatatgcatttaccgacgctccagcatatggaataggaaatacttttattttatttatttcactcactcctatgttcaacttgagcccactatcattactatataaacctataagtattcaagatacatttaattgtacttctctatctctcgctgctctgccagcaacaaattcaccatatcactatagctattcataccgtctgtctgattatttgccttcagatatacatcatttacatttcttgaaatacttgaaataacaccctcatacttatcccggtactgctcattttgttctatatcatgctgcaccgccttggacagactggacattatatcagacgcctgatctggatccactttctttagctcagatatagaataatcaaatgctagaaaaaaaccactgtaaagtatcattggatcatcctgctgcttacatgccagatatgctataaaatttgcctcatcctcatgcatgaaaccactctgatgtgccaattcatgtgccatagtagcaggcaccaagaaaacgggcacattaacattgatattggattcataagtaaaagggacaaagataccatttatccctgcatgcgacattagctttgacatcacaactggttttggtgttgagtataaagaatgctccaaaataggatattcctttgataacatttgcatcgagaacactgcgtgttgtgcataataatcaaaaacctccggtacttgagccaaaagatcagtgtccgctaacttttcccttgccaatcccatttcaacggcaagcgacttactcaatttgaccagttcctccttgctgtagttctcttctttatattcggtataagacaaaaaagaatatctgtaatagtttattccacccaaaatagtataacaaaaatatatcacgctacagatcgtaactattcctagagcaccacgataaactaccatcctacgtacacctttactcatgataaccttgcgcacataataaacgatataaaatagaaaaagtaacacaaccaacacgacgagccattcactaacagaaaacttgacccaagaaggtacaaatcctactatttttgacaataacggatatacagacctactgtatttttccgcccaatcctgttggttctgcgcgtatattgtcagtatgtaagctataactccaagtgaaatcaacggtaatctcttaagtaaaagcttttttataatgtactccccctatccaataaatatcagatgtacgccatgtaacctagtcatatcatttctttatttcaacatacttttcctcataaaaatcatgcttattagaaaaaacatattgattcataaaatctataggaagtacttcataagcccagtaggtaccattaggtctattacttgaaataacttgtcgggcgatttcagcagccactgtacccgttaactctgaactcgtttccatttgtaaattcaatctgcacctaacatcctttccatttttcactcctgtagcatcaatgactaaagctatccattcctctttaggttgctcctctaaacgaatatctagttttttcagggcttcttcaaccgaagactcaagttgcatttgataaaattgcattgctaaacgaaaaatattatcatttgctgctatattgtaccagtggagttcttgtaccgaactaacttccagaatatcaatgatctcttgacttaaatacggtttcttatagacagggacatccacttcaggtacaaattctttcttcatcatatttatattttccgtttttacacaatgatcactccaataagaatctgtttttccaattacactatggccactcattaatatatctgagatagaagttttcgtataatgttccgcaccaccaatataacaattcacatacttcgtttcgtctaataaatgatttattactcgttttaatagcagacctgtaattccaggacaaaaaccagctcctatgtaatttacaccgttagctttaagctctatttgctcctgactcaataataaagcattggaagcatcgacatattttgctcctacttccatagctgcctgagcaactctatctttaattataaattcaggccctgcacaattaatgacaaccgtacaatcagtacagaacgcaatcaagttctcccagtcagaaacatccagtaattggtagttaaaattattaaggttcattaatgctgtaggttcacgccgctgtccgcccttaacaataaagtctttacataagttcttacagatgacttcaccgatcattccgccacacccaacaactgcgatttgctccatccgtacgacacccctttcatcttatacaagatttaaaatacaagactagttatacctttctctattaaaagatcattattatgtctactcaacatactcaatgcataaaatctttgtttggcttccattaatttatgatacgtgccatgttcttcaattttcccattattcaataagacaatttcatcatatccactaagaattgattcatctagcctatgagtaatggaaattctcgtaatgccctgcatttcacttaacatacactcaaggtcactagctgtttgattgtccaacgctgaagtcgcctcgtccataagtaatataggtgattttctcaggagtgctcttgctatagaaattctctgtttttccccacctgaaaaatggattccattttctccacataatacatcaaagccgcctctgtcatgaatcaatttctgtaacatactcttctttattacttgctcaaactcatctgtgttacattcacgaaacaatttaatattttgttcaatcgtatcatcaaagataaaacagtcctgatgaataaaactaacgttttggaaaatggactgatcacttattttctcaagatctaccccgtcatacctgatatttccttcatacccatcataaaacccagtcaacatctttaataaggttgtctttccactcccacttgttcctacaatggcataagactttccatattcaaattcaaaattaatatcatctaaaatttttttcccatctacgcttaacgaaagcccatttagagaaattttattactgaatttagggatatcaattctttgagtttgatccgtttttgcctctccaattttattgaaattcattaataaagcccgactggccttccttttggtaaaaccggttatgagtctattaatgggaactgttacacaatttaacaattgaataaaagccataatctctcctactgtaatttctcctttcattagctgctgagtacccacaataaatatgactacagcaacaagaaaagttgaaatatcagtaagtgacataatgagtgacaacagattttcgtataccatttttgctttttcctgcttgttcgcctttgcctttgccctttcaaaaatctccttttcgatgttaaagctcttaacaacctgatttccagacaatatatctttaatgaaagatacataatttttattttgctcagccacttcaccttgtgctttttgcatacgattattaaatatactcgaaactgcaagtggaatgatacaagtgagtaatatactcaatgcaaggaatgaattaatgataaacatcgcaagcactccacctacaagcatagctagctgaacaaatatttccacggtcccttttatataatcgttttgaattatcgttatatcatttgacaatcgtgatatgtaggttccattactctccttgttgaaacttctcatatctaaccgcaaaatattttcaacaagggtatttttcaggtttaacgttgccctttttgtatataaatttttaacagcataccccacatacattcccactgcacctaaaggcaataaaataacggaaacagtagtcaccttaatgatattgtcaatatctttattaatagaataatcaataaacttttgtagtataattgccaatgcaataaacagaatagatgtcatgataccaagtaagcaggacaaaataaataagcctatattctttttgtatatgctttttgaaattttttcattcatactctaagcccccttcttgtttctaatttcatttagagcatgtctaatttacactccaattgtttattgctagatcatgtgcatatttcagatatgttgggtgggaccgcgagcatatgcacatgatctggcatcatatgtctttttatgacccctccacccgcatagcgggtggttttacgggtaagatacaacattaaatattcttcatgacatcattaaggagctcttcttcaattgtaatgcctgtaatgcgagcaattagagtactattttgaatgtaaaagtgcatgctaactccaaaatcttcagactctataatctgtgtttgtaaaaacatcttctcaagtgatatgtcatctctacttgcaaacttatcaaggactccctgataattaatgattggaatgcggtgggacatttcattaaaatcgtacttttgtgctataagaaacaacttttctgtaattgcagattgattaatactcgatttttctgatgttgataaaagctgtttttgcgttttacttttcctatcataaattgaataatctaaatttaaagttagccccaacatttccttattgaattcatctctgttatgtgtcaaaacagaaacagggatgttatttaattcttcaggtaagtcactatacataagccttgatataaattctactgctgtattaatgggttgttcgctaaatttctgatattgtaactcatttagttttacatgaatttctgtagacctcttagtgtctcgtcgagagaccaaatcagctgattgtttagcagcttcaatatactcttccatgttagactcttgagcatctggaatttccagttcgtcaactttctttttaatcattttgcaatattctatgaaagaatagttatagggagtggtaagtctgttgttcaaagtttcatgaagcataaccttaaacaaatcttgtgagactccatcccatattaaatgatgaattgcactaagtactaagcaatgatctgcatctatttctacgattaaaaatctagataacagcttatcatcagttagaaaactcatttcattcacaatttctttaaattgttctgcagataattctaaggttcctttcactactggaatttcccactcatctgaataatcgtattcttctaaataggtcattttttgatttaatttcgttcttaatgccccctgcctggaaattattcctctgagtgataaagaagcgttctctgccgttccttctattgttatgatttcagtaataatttctgtatccggtcgcaagaagtcctcctgtcctgtcaatacaggacattctaaagtagaacgtgttttaatatagttatctccataataattcaactgtttttgtatcatgcactttagatcgccatcacggttatcaccaattaatgtttcatctaatggcatttttactgttccttttctggttaaacacgtttcgacaacatccttaattgctctttcatatgccaataccaatgtttgagcatcctcgtcagtatacaatccagtatcatatatgatgtcaaattcaagttgcccatttaaaacagccccatttagagacaatcccattcctgatgaatttttttctgacatacttcttcctaatggcattcccgacatggatattccttcaattctgtctatctcgttatccaattctccaagataattgaatgttattgctgcgctcatctcaagtccgctatgctcaccaagatatctcaaaattccatatccaattccatgattagggacctgtttcaatgtttgttttgcctccaaaatgctttcttcaacagtatcttttgtctccaaaataataggatatacacttgtaaaccaaccaactgtacgatcgatggcgatctctctatctattgtctctctcccgtgaccctccatttctatggttaggtacttagagtttctccattcttttactgcaatggtcagcgatgccagtaacaagtcgtttatttctgttttatatgtctttccagcttcgagcaacagctttttcgtcgtttcagagtccactttcactactttatttttatattgaccacttgctgtttgtgtactcttgaatgtctcagtactatttgatttatccgatatatttttccagtatgctatttcatctgaaagcacttcactcttagcatattgtgttaaagcattcgcccattccttgtacgaagccgttttcattggcagcgtgattttacctgtctcttgtatttgtcgatatccactaaataaatcctccagcagaattctccatgatacaccgtctatgaccagatgatgtacacaaattagtaaatgatctccactgtctgaatggaacagccctacttttactaaaggcccggtggctaggtctatgcttgcctgtaatttatcgctggcatactctatctctttcgatacatcttgcacttttgtataatctttttcataccaatcatatagcttgctttcctctgtagacagcgtgatttgacgttgtccgtcatatacatttcttaaagcgtcatgatgtttaatgatttcagtaattgctgtctttaaactaggtatgtcaaatggctcatcacttcttaacattaaggcctgattataatgattaggtacgacgtgattcttattgaaaaattctagttgtataggggttaatggacttgccccattgatttctccctgttcgtatacttgatttacttctcccatttgaatattttccccaatctttcttggggtctgctgatacattaatgcggcgaaagaaagcttataacctttttcccgtaacttcgaaacggccttaatcgctttaatagaatctccgccaagttcaaagaaactgtcttctattccgactggagatattcctaagatttcttcaaatatgtccgtaatgactttctctgttttagttcttggtggcatatattcctgtcctgctaatgcatttagttctggcagtgcttttgcatccagcttcccatttggagtcagtggcaaggcatcaatctgcatcataaagccaggtaacatatactcaggcagtttgtctctcaaatcatttttgatttcagacatatccagttgctgctcttgatttgtcgggatcaggtaggcacatatactcttgtcaccgcctacttccaatgcaacaacggctacatcagatatacccggctgattccttagaacgctctcgatctcgtacaactcgatccgatatcctcggattttaacctgttcatctattcttcccaggtattccatctctccgttaggcagccatctcgccaaatctccagagcggtataacttcccttcgccatatggattgtcgataaacttctccgctgttaattcaggctggtttagatagcctttggctactccgtctcctgcgatgcatagctcaccaggaacgcctacaccacataactccatctcattcagtatatagagctgcatattggcaatgggatgtccgattcctacacttaaacccttatctttttcgctggaatagacatagtcacagcatcctacagtagtctctgtagggccatattcgttatggatcttgacgctttcacccaatagcttctgcgttttccacgccgtatctgtggtgaactcctctccaccgacaatcagcgtttctaaattcggcacatctacgccgtctgcataggtttccagcatttttaaatgtgacggggtaagcttcaggaaggttaccctgttatcttttaaagctgcacgtaacctttcctccgtatctcctccctttaatagaagagatccaccactaatcagcggtaagaacaaggacgttacggagaggtcgaaacttaagcttgtcattaataccgtcgtacaagcttccttctggtattcttgatctgcatacgacaagtaatgatccaagttacctcgtgtaaccgccacgcctttgggctttcctgtcgttcctgatgtgtaaatcaaataggctatgtcacttttttcaacagcacacgctggatttgtctccttctcacccagatcttcaagattcatcgagatgaatgggacttccgtttccatagtcttctctcttgttaaaatgaccttgggtgctgcatcgtttaagatatgctctattcgttccttcggagtcgctggatcaatcgggacataggaagctccactctttagcacgcctaaaatgccaatgatcgtttccgctcccagtgaagccatgatggccactcgatcattgggctggacacctaacgaaatcagttcccatgccaatgcattggccttgcggttgacttctccataacgaagtactcccgtttcgtattcgattaccgtcttctcgggtgtctgttccgcatgtttctcgaatcgttccactgccgtatgatgctgtgcatactccgtatgctccgtatgggtattattgaaaaccgttagtattctttgttgttctacctcactgaccatgtgtagttcagacaatttcatatcagggttagcaatcactctatccagcaataccttaaaatgctccagtatgacctgtgctgaagtctgggtaaataaatcactgcaatataccagatctaaagcgtacccctcttcatgcgctgtcgcttgcaaatccaaatcgaatttggcatcaataaaatgaatgcccaacatgtctacttgggcttcgcccatcgcaagatggatatcttcgtcattctgcatggtaaacatcacgtcaaacagcggattgcgtgacagatcacggcgtacttctacttcctctaccaattcttcaaatgggtattcctgattctcatacgcgtttaaggccagctcttttatctcgcttaaaaactccaggaacgttttctcgccccttggatatcctctcattgccagcgtattgacaaacatgcctgcgatcgtctcggtgtcctgatgcaccctgccggagatgggtgttcctaccactatatcttgttgcctgctgtatttatgcagttctatcataaatacagccagtaaggtcatgtaatctgtcgttccattttgtttatttatattttcaattccaactttttgttctttactaagttgaacagacacttgtgctcctttgtaactttgggttttcggacgtggatagtccgtcaccaaatccaaaaccggtgcctcttctttgaatacttctttccaatagtttctctgactctccaggtttctgccacgcatccattcactataatccttgtattggatttcaagtggttgtaattcttcaccgttatacaatcgtgagaaatcttcgattaatagattgagcgtctgatgatcggaaataatatggtgcatatcaaatagtaaaatatatttgttccgatttctttctttcactactttaaaacgcatgagcggtgctgttccgatgtcaaacgggcgtacgaattgttccatgtcagcgtcactgtagctgtcggtctcttcatattccacttggtagaatacctcgtctgcaatgacttgaagggtttctccttctgtcatgacaaaacttgttcgcagcgactcatgacgctggatcaggcgatctatggcttgttgtattttttctacatcaaggttacccgttacttctagcgctgacgccatgttatatgctgtactgttaccttccatctgatccagaataaacaatcgtttctgtgtagaggatgctggataagcttctctctgttctgcttgtggtattggactatattcaccttctcccgcggcctcaatctttctggccaacatggaaggagttggtgaactaaatatctcttttactggcaaacgaattcccgtcttcttctcgatggcattaatggctgccgtcgcttttaacgaatgtccacccagttcaaagaaactatcctctatgccgactggagatattcctaagatttcttcaaatacatctacgattgcctgctccgtcttattacttggtggtacgtagttcaaactttctaacatatctggctctggcagcctagttttatccagcttcccatttatggttagtggaaattcatcgatctggatcataaaggcaggaatcatatactctgttacttcttctcttaccgcttctttaatttggggtatacttagttcctgccccttttctgcaatgagatatgcacagagaatatcatcatttccaacttcttttacaataacgacagcatctgcaatattactctgctttcttaatacactttcaatttcacctaactctatcctgtaaccacggactttcacttgttcatcatctattcgacctaaatactctatatttccatctggctgccaacgtgctaaatctcctgtacggtacagttttccttcaccgaagggattcttaataaacttcttatctgtcaattctggctgatttaaataacctcttgctaaaccatctcctgcaatacacaactcaccaggtattccaatcccgcatagctccatttcatttagaagatatacctttgtatttgcaatcggacgtccaatggaaattgaagtagagtctgtattcactctaaaactagttgcatttacagtagactccgtaggcccatatgtgttaagcacttctactctttccgcccatttttttaagctttctagactacctgcctctccacctgactccagcaaacgaagcgtcggtaatgcgtcaacacacaacccgtctattaacttaggtgtcaatgaagctgttgtaacattatttcgatcgatatatttttgtagttgctccatatcataggttaaatgttttggtacaatgcataatgccgcaccattgcatagtgcagggaagatatctcccaccgcttggtcaaaagatatatttgcaaattgcagcaccgtatccttgtcgcttagtgcaaatgtctcctgatatgtgacccacatattgaccacatttcgatgttcaattaaaactcctttaggatttccagttgtacccgaggtgtagatacaatacactaaatcattagacctgttaacgtgcaaaagattgtccgtttcattagcataattattctcatcttctaaatctaatactggtatctctaccttccctggcagcttattcttatacgtcaatacaatctttggactactgtcctccagcatatagtgaattctattatctggatattcaggattgatgggtacataagctccccctgccttgatgatggctaatatccctacaatcatttccatgctgcgttctgtcactagagccactagatcgtttggagccactcctaaatcccgaagagttcgcgccaactgatttgctctttcattcagctcggcatatgtcatcttattatcatcaaatttaagtgcaatatttcctgctgttttctctacctgattctcaaataagctgacagctgtttgttctcgagagtattctacattcgttgcattgaaatcaaccaagatcttctcttgttctctgagatcaagcatatgcagatctttaagctttttgcctggatgtgttatggcttcctcaagcagcgttacataatgccttgccatatattcaatcgtttcttgtttgaataaatctgtgcaatactcaaaatctatctcatacccttctggcatacattcaaccagaacggataagtcaaactttgagacatttcttttaatgaatgcactttttccgcccaataggccttgcatttccgtcggttttttcttttcttttaatccgaacataaaatcaaaaattggatttcttgagagatctcttttctcctctacggcttcaactaaatcttcaaattggtattcttggttatcataagcctgcagacacttctccttcacagctaatatcaaatgctcaaaggtctcatccggactaacttctcccttgatcaccagagtattgacaaacatccccaacatacccttagtatctgcatgaactcggcctgacacggtagttcctacaataatatccttttggcgactatatttggctaataataaaatgaacacagatagggtaaccataaattcagtagcaccatgctttagagctagatttttaacccctgagcttaatggctcctttacctttgctacaacattgtctcccctgaaagactggatttgaggacggaggaaatccgtcttcaaatccaccctagcaatttcaccagcgaattccctcttccaatactcttcctgttttgagatgtcataaaaattctgccatacactgaaatctttatactgaacacggttagaatttttattcataagttctcctcttattcataatcagttccatcattttcataaaattcgttcacttgttgcagtataactggcaggctttctccatcacatataatgtgatgaatatcaacaaatagataggaggccgttgttgtcttcattaatttcacacgcatcaacggtgcttcggataaaacaaacggttgtataaatttatcgtattctgtttgtatatctatttcgtccacttcgctgtagtctattaaaacccttgcgtctggagaaatcgtttgaataggctcaccgtccacaacatggaaactagttcgcaagatttcttcttgctttaacagcttatccaaagccttctgtaatctttctttatctagcggttcttcataagcataaacgtccgatacgttgtagttaatattaggtccggtcatctcgtccagaagatagagtcgtttctgagctgaacttgtagggtagtattcagctgctgaagcttgttctattgccacaaacatctcgctctcaatcgactcgatatttcccgctatctgctcgggcgtaccaaaagtaaaaacatctctaattgacaatcttactcctatggccttctccaattcattgcacaagagcactgctttcagtgaagatccccctagatcaaagaagctatcagttacactgacttgttcaatatctagaatgttctcaaatgcctgcacgatcagagtttcatattcatttcgtggtgcaatatattcctgtgacttgtactgcggctgtggtaatgaggctttgtcaagtttcccattacttgtaagtggaatcgcatcaaccgaaataatatgtgcaggcaccatgtaatctggtaatactttacttaacttgatcttaacgtccttttcttctatttctgtctcagttattacataggcacacaggaatttctcattccttttgtcttctcgcactatgactacagcttcatttatgctttcaagctccaataaacggctttctacttctcgtggttcaatacgatatcctctgatttttgcttggtcatccatccgtccaatatattcaatgtttccgttaggtaaccaacgtgccaaatcacctgtccgatacatctttccggatccaaatgggttgtgtacaaacttctcgtctgtcaggtcttgtcgatttaaatagccttgagatacaccctcacctgttatacatacctcacccggaactccaattccacaaagttcatttccatttaatatataaatctttaatgttggaagtggcattcctatatcgctaattcctctctcgatggcttcagcatcaatatcgcgataagtagcgtataccgtggtttctgttggcccgtacatattaaccagacgacaatgtctattgttctcatgccatttcttcaaatgtgctggataaagtgcctcccctgcaaaaataacatatcgtaaactatttatggtttgtcctgtcgttgcatcgatcaacgcatagaatggtgaaggtacctggcataagatggttaccgcttctttttggagcagctctccgaaggcatatccatcttttactgtatcctcagaaggtattacaagctttgctccattcaatagacttccgaatatttcccaaaccgaaacatcaaaacaataagaatggaattgaacccaaatatcattttcatataaatcaagcttaaacttgtcattcttgagtaatcgcactacatttacatgctgaaccataacaccttttggccggcccgtcgtacctgaggtataaataacatacatcaaatcacttgagtgatttacatgaacaaggttactgcattccatttgataatttgcctcatcatgaagatgcatgacaggaatgtcaacttcaggttcttttgtactgcataatacgacctttggtttacagtcattaatgatataattaattctttcctctggataagatggatcaaccggtacgtaagctgctccagcctttaaaatagcgtatatacccaccaccatctccaaacacttctctgttgagatcaccacaaagtcattgggttgaatgttatagtcctcacgaagctttcttgccagagcattcgcccgttcatttaattgtgcataggtcatctgttgtccattaaatgtgatggctatactattaggtattctggcggcctgctcttcaagtaactgcacaatcgtcatattttgagggaattctgcatccgtcatattgaactcacccaatatttttgcttcttcgtacagatctaccatggcaatctcctgcagcttcttttccggagacattaaaactccttcaattaatgttaagaagtgttttgccatgtactcgatcgtttctggtttgaataagtctgtagaatattcaaaatcaatcttatagccttctgaatcacttatcatggttaaggtaagatcaaatttagaaatactaccttcaacggattcccttgttccaatatgaatacgatccgaataactctctctctcatcgtcctgcaatacaaacatcacatcaaatactgggtttcttgagaaatctctctttactcccactgcttcaactaaatcctcgaactgataatccttgttatcgtatgcctgtaaacatttctcttttgtacgtaataatacatcctcaaatgtatcatcagcgcacacattccctttgattgccagagtgtttacaaacatgcccaacatattttgggtatccgtatggtttcggcccgatattggcgttcctactataatttcttcctgtcgactgtattttcctaacatagagaaaaaggtggataacaacaccataaactccgttgcaccatacttcttcgctaactcttttactttaatactcgttttttcttctacctgtgttcggaaattagcacctctaaagctttgtttatgagggcgtggataatccatgattaaatccaggactggtatatcaccggagaattctttcttccagtacgctgcctgttctgtgatatctctagcattttgccaagcagaaaagtctttatactgtactcgtggtgttaacaattctcttccttcatataactcttgtattttgtaaagcataactggcatgcttcctgcatcacataaaatatggtgaatatccaggaataaatatgaattacttggagtattcagtatttttgcacgcattagtggtgattttgacaggtcaaatggttggacgaaagtattatattcatcttggatatactgtgaatctgctgtctttacttcactgtgctccagcgcaattcttgcatctgaagaaattttttgaattggttcaccattcacgatatggaaacttgtccttaaaatttcctcatgctctactaattgatccaatgccctctgaagtcgctcattgtctggtttaactttaagcttgattactaaaggaatattataagttataccagggcctgttagttggtccaaaagataaagtctcttttgagctgaacttatagaatagctttctgcttctgctatttctggtatttcttcaaacgtattctcctttgagttttttatttgttctgcaatattttttggtgtaactaaatcaaaaatttctctaagtggtaaccttacccctgtgctcttctctaattcattacacagccggattacattaagcgagtatccacccaaaccaaagaaattgtcatttacacttactctttccataccaagtacatgttcaaatgcctctactaccaatttttccgtctgggtctttggtgcctcataaccccttatcatcttagtttcttcaataaactgttccgggttcggcaataatttacgatctactttaccatttgcagatagtggaatctcatctacctgtatgaattgtgccgggatcatataatcaggcagatgtttggctaactctctttttatttctgccaattctacggtctcatctgcaacaatatacccacacaattgcttctctccatgtgaatcactgtaatcagcgacgacggactgctgaatatgtggcaaatgattgatacagtgttctatttctcctagttcgacacgatgtccacgtatcttaacttgactatcttttcttcccaggaagtctacatatccttccggacgcatgacaccataatcacctgttttgtacagataacctaatctatggttgataaaggcggccttcgtcttctcttcttcattgagataacctgcggcgactccttttccaccaatatgcagttctcctggtacgcctactgggcattcttccccacattcatccagtacgtaaatttgttgatttttcagcggatagccgtaagggatacttttccactctggcttcacttctgtgattgggaaatatatggaccatatagagccttccgttgctccacctaacccgatgacttgtgcttttggcattcttgttttgattttcgctggcaaaccaagagaaatccagtctccacttagcatcaccatacgtaagcgctctgctgaagtgctatgcaccgtgtcttgctttgtgctttctagatacatatccataattgccggaaccgaattccaaatcgtgatttcttcttcgatcatgatctgatgaatactggccatatctaaaagatctggaattaatactaactgagctccgctaatgagtgctccaaaaatatcatagacggataaatcaaagctcatcgatgatagggcaatgattttatcttcgctatttacttggaatttctcattaatatctaataatgtattcactactgcttcatgggtgatcacaacacccttaggatgtccagtgcttcctgacgtatagatagcataggctctatcctgctggcagccttctaacagttctaaggcgccatcgttataggtggaaaggttctctgtttcatataaatctggatgaatcatgagcttgatatcactatgttccacgatatattttattctttcctcaggatgttccggattaacaggaatataagcatggccggcttttaaaatagctaccatatttacaatggtctcaattcgtctctctgcccaaactccaatataagaattgagtgcatagttttgttctgctaaataacgagcgacctgattggattttctcgccaactcgccataggtcaatgtatcctgtcctaatttgactgcaatagcatcgggagtcttctggcattgctggtctattaatctttgcagtaaatccccttcataatctccttgtgtacgattgtaatcaagcagtagttgatactgtgttacaggcagcggcatagatgaaagtttattgtctataacttgctgtaatcgaagttgatacgtttcaaacatggcactgatcatgtcttcatcaaacaaatcttttgcataatcccaagtcataattaattgtccgtctctttccgtgacttggaaatctaaaaatacttgaggggtctggcttattccgtatttaattttccctaatttcgtcaacgtatctgcaaattccgatttatcgaataacatactagtaaatacaattggcataattgctttactagtcatttctctcttacttgcaatatttcgtataacatcaacaccactataaaaacgatggtctactgcttcaaataatatatcttgaaccatagatgctttctcccaaaaagcacgatgaacagataaatcaatatctaacaataaaactgatgtaaaatctccaatcaacttcattacgtcaggatgaaaggtctgtcgattaaataatgttaaattaagtgccattctggattgattgctccatttgcacaaaacttccgcataaattgtacataagaatacagatggtgttacaccgtactgagttgccaggcccttcacaatattccattgatcagttgtcagacttttctccattcgctgaaatattggtttctctatgaattctggctcacaaactaatggtagctgaggtgcatagggaaaatcctctattttggcttgccaatagtcttgagctttttgataggcggaagattcacgaaagctctccaatgcccttacataatctgagaattggaatgttaaaggtttaatctccatattcggtttctcataataatccattatctcttgtattaaaattaataaactgcctccatcagcaattaataagtcaatatccaggaagagataatttttcttctcaccaagaataaatgcagtcaactcaaataatggccaatgatcttgttggaaaacaaaatgtgacctgctatttcttttttccaatatacgcttttgttgatcctctaaagacaagtcttgtaaatcttcaatacaaatctcataagaagacttagaacgccgaactttttgcattcctgtctcatcaaaaatagtacgcagcataagctgacgctctaaaacatgattcaatgcatcgtttaagcgtttaatatctaattctgtttcaaactcataataggcatgggtggagacattacccatttccataatattttgtcttccaactaaataggctccttgtatttctgttacctggaacggctcataccacatgtctttattccctgttaattcggatgctttgacatcctctgcctttagttgttcctcaaccatcttaattatttgttccagggtggacattttgaaaaggcttacaatagggatttcgacttgaaatcgttgatttatttcatcctggaaacgaatcaacgttaacgaactaactcccatccgagaaatcgtatcgtctactttcaaagaagggatagagaatacttcttttgcaatttcaacgatttgattttcaatctccgttttgttccatgctgacttctttgcagattccttgatactctgataagaatatggagctattgcgataacttcatcaaactcatgattctcaaatcgctctattaaaagaaaacgttgcacctttccacttgttgttttcggtaccgtttttattggaattacataatctgcagctattccaacccgttctaataccatatcctgcacttgatgggcaagtggcaaaaatgccttggcatcttttcgattatgtacaaatactataatttcatccctgatcgatgacggattgcgaacaccacacacaacgacttgagacaactctgggatcgccaatgttaacatattttctatatcgctagcataataattctgaccatttacaaacagaatatccttctttctacccattacaatgagttctccattgcgtaaaagtcctaaatctcctgtacagaagaagccctgttcattaaaaggggaactatcatgattcatatatccctcaaatacatttttccccttgatcactatattgcctatgtaattttcccctaagatgtggtcttcatcatctacaatcaatatttctaattcatataatggttctcctactatggcaaactctgctgcatttggctccttcgtttctatatactccacttcttgaccaatacgagctttatgacggttaatacatacacttctattatggccttcttcaggaatagtaacagccagactagcttctgccataccatagacttgatggatcgtattttcacgcaagccagaagacgagaatttttcataaaatcgtctaatggtatccattgatattggttctgcaccacacattatgtttcgcacactagataaatcaatattttctaaatgtgaatcctttacagtctttatcatccagtctaatccaaaattcggacttacaagcaccgttgcttttaattgcgcacatttttgaagatatagccaagatttctttaaaaatgtacccgaatttagaagggaatgagatatacccgcaaatatcggagttaaatgataaccgatcaagcccatatcatgtgtcaatggtaaccaactagccatgacatcatttgtgtctagtttcaaacgatctactatctgtgccaaattataaactagattttcatgtgttaattttactcctttagggttacctgtgctgccagacgaatattgtatatacgctaagtcctgacaatctactgtaacgcattgcccctcttccatattacatgctaaggtttcatactttaagtatttcaaattattggcttcataactttctctaaacgtatttaaatttctttcatcagtaattatccacgcattcggcaactgctcacttactttcactaacttcttgaaagcttcagtgtcaggcgatgcaattagcggtacagacagaggaacggggatcatgcctcctaaaatacaaccccaaaacaaccttataaaggataaattattgtttgtctgaaagataatataagagcccttctgaaatccctgcttttgtagtgcccctaagatggatttggcattaaaataaagactttcataagactcaaacaattcagagccatcggattgagtaaagtaaactccccttgatttctcgttagcataaattccaagtaattgatctagtgttatattaactccatcctctaatactgattttgtatagggtttcatattgcacctcttaaaaagttattgtttttatgctgcgatattatctttgttacaattgatgcaacgtcttgatcttgcctctttaatattaaaatttatgttgagaattatttatgtatattggcttctataattctattatattatatttaaggattatatcaacaaaattcttaaaatttttccagttcaaagggcgtggtttaaacccaccgcccttagccttcgggttggatagtaataatcagaatcacttaaaaaaacactcaataatgcccccgttgtcaagacacgattttttgaggaaaaagttatgtccttcttatcatgtcatgtagcatttcaggatgcgatctgttctcaatatatcatttttttacattttccaatttaatagcgtgcagaaaggcaaacagcctctgcacgcttgtgtataaatcttaaatttcaacttatatcttatatcatacagcagtcattttcttgatcatccagacggtgccacatcaaatgctcatcggtttcccttgatagtcaacgaaaacaaattcactatcgatacgaacttgtcgattaatgagattataaatatcttctgctgtttcttttggatgtgtcggggctatcattcctcctatatccgtccttacccaccctggtggacggaaaggacttgaatgccttcattctttgctacatggagcttctcggacaacatatttaaggcagctttcgacaatccataaggataatcaccactatatgcatttgttagactaccaccttctgacgagatgttgataatggattgattctcaccctttttcagcaaaggtagaaaatgtttaatcacacgggctggtcctaacgtgttgacatcaaatgctagtttgatagcctctatatcaagatcctcaatagacgtacctcttccattaagaatggcagcattattgataatcacatcaagactttcacctacattacgagctgcttcacgaacagattcctcgtctgtgacatctaaatgaagaatttataactggttgctatttttctcttttaatttggttaattgagtccttttttgttcattcgcatctctgactccagcaaaaactcggtaccctttttctaatccaacttcgacaaatccaagccctaagcccctatttgccccagtaattaatatatccaccataatcctcccagatttttttaatagttattttacggatgcatgtgatagcaataggtaagactttgatgtaatcgccatcttttcccctgctccgcacccaacgtgcgattttcaccgcattgggcgttccatcttattcttttatgctaaagtaattctacaaatttaaggttccatatcgcatctatttgagtatcaaaggttttaatttcataatataaattataaaaaaaatgaacaaaactaatacaatcctattctacctttacttaatctaacaatttcagttcaaatccacagttacatttttttaatgtttttcttatcggagatatcttactgttacatcttgggcattcattaaccaaatacaaattatgtatgggacaaataacattaactgtatagttccaaattttcttctgataaaaattcccattaaaacaagctgggcaaattttatcagcatatgaattaatacctaacttaaagcccgtccttataaatccaagattagtggtatccataattttatcattaaaagtcatactccataattctctttcagtaataccagtaatgttgctcagtaactctaaacttatcttacccgcatcacctctaacaattttctttttttatctgagccatagtatatatccaactcgaattttcataaccattataatcagttattcttaatatatattctgctaaagattcatcttctaaatgttttggagttagcaataacctttccaataagccatacctctccttcatttatttttttattattcaaaataaaacagctaagaaaatataattttcttagctgttttactttctaactgattttgaaatctagtttaggagttcttgaaactattccgaataattatgaaaaatcacatcataatgctgtcatttcttcgtgctcgtgttcatcctgcacgaataaaatacctaattcatgatgttcgccttcataggacgcgcgctgatcaaaccggatctcaccgttcaggccgatgatctccatttttacaaatgcgcggtttttttgaagtgcttcataaaaatccgacacatgcttcacggggatgccgtttactttcgtaataacctcaccgatcttcagctcaagatcgtccgcgggtgtattcggaatgatgccgagcaccattaaaccctgatcccgcttagagaaataaaacggagccgcgttatcgttcagccgctgtctcaatgataaaaacaggcgtccgagcaccgcaatacaagcggcagctccagcaagcggagtccaccaaagggccgctgccccgaatgcggtcacgataaccccgagaatcatgacacgtttcgccgttatccttatgctgacttccggaagtgacccctgcacacgctgtccgaagccggcgatataaggaatccagatcaaatggaaagagccgcccggcacggtaaagacaggccaccaagaaaggtgtgactcaagcccgctgcccggcaccaataagaaaagcggaagcagccatgcgcgattcgccaattgtcggccgatgggcaggcctctgctgctgacgacaagcgccggagatgttttcagatgcgctgaacggcaggcagccgctccctccgtgataatcaaaaggcccataaacacggccgccgatgcccaattcacgccgaatgcctgcggaaaccgatccgcaaacggcactgtgtgggtatactgaaggataaacgcaatgaacatgccggcgctgacaatataagctgaggacagccaattcatacggaacgtcagcgaagccaaagccgtcacagccgcgattatgccgagaagaccgaatggaatagaaattcccagtccaaaaaataatatggagagaagaatacccggtataagtccttttatgtatgtaaagataagctcgtcatacatatccgcgatttttgtatgaaacgtatggcgttcacgtttgatccgcaaatatccgcatgcgagacttatgatgataaaaaaccagaacatcgggtgcaaaaaaaacagaccgatacttttcagaagttcaattccccattgaacagacactgctttcaccgcctcaagccaaacattttaattctattctaccaaataatcattggcttgaatatctcaaacgtctatctctcttccgtcatccacaacgttacatttgagagagagaaatctttcagatagtggtcaacctccacctcgatcacgccgctgatcagaagcatggaccgcttaatatccgtcagattaattcctaaacgtttatggtttttcattaagtaagtgaaataatgcttcgcacactcttcattgatttcgtgaacgcattcaacatttgtgtaattgaccaggtatctgctgaacagcataagaagacttagtgcttttgttgatgaaaatgtgacgtcttttgttctgtcttttagttgttccactaattcataatattttttttcacgcacaatacttgccctcttcaattgtgaacccccatttttttatccagataagcacgggtgattacagctgccgtgctgaagcgccgcaaacacttctgctttcgatactgaaatgcagctgccaaactaaaactgttctctattagaaccttcttttattgtaagaactaaaactgactgaggcaactttcaaaagtttcattttgaatacatattaactcggcataaagtctctcttctctataaatatcgggtaatgtttgtcctttataaatgtttaaatgtgaaaatttttttaatatcttgtcaaaaccgacataattatatgtctttcagttcatttttagagtgtgacaaaagaaacaggagacgtaaaaaacgcctcctcttcatttattttacaaataatgattttaacgccatttgcagctgtaaatcatttttttcgtcagatttcttttcattcatcagctgattcattttttccgctgtctttttatcaatgaccgctgttttatcaagcttgtaccggtcttgaaacgccagaacggcttttttcattgttttgctgaaatagccgtccgctctgcccgggtcgaagcctaggcctttcagcaggatttgggcgtgtttgacatccgcgctgttcatatcaggctgaagcggctgtttcagctgaagcggtcccgccgcaaaataatccggctggctcacggcgattgtcggagcaatgccttttttgtggatccaattgcctttcggtgtcagccatttgtaaagcgtcaatttaatgttgctcccgtctcccataggcacggcctgctgaaccgttcctttaccgaaagaagtgtcaccgacaacgtcataatgtcccgcttcttttaacgcgcccgcaagaatttctgaagcggaggcgcttcctttatccgtgatgacattgacgggatacggcttcttatgttttaaggttgagaaatattgttttttatcgccgttacgctccgcaatttggatatacggcatgtcttttgtgatgaaatgctttaaaatttgttcgacgctttgaaggtagccgccgggattccctcttacatcaaggacgagaccgtcaatcccttgtttttcaagctttttcagcgccgcggcgaagtcctgggcggtatgctcggaaaatgtcgatatgccgatgtagccgacatgatgaccgcctgattctttgcgggaagcaaatacggtttcaagcgggatttccgctctcttaatccggaatgacagctgtttatcagtacccggacgctgtattttaatagaaaccttcgatcctttttttcctctgattttcagcacggcttcgtttaaacctttcccgttcattgactcgccgtttatgctgatgatttcatcattcggcttgagtcccgctttttccgccggagattgcttaaacggtgatacgataatgattttattgtctttcataccgacttcagcgccgatcccttcgaaagaagaatcaagagaatcggaaaactgcttagctgtctgcttgtccatataaacggaataagggtcgtttaatgtagacagcatcccctgaatcgctccttcaagaagcttttcgttatctacattttccacgtattcgttcgagatcagctcatatgctttttcgattttttccattgcccggcttctttctgcgtctgatgaattcggctgtgccgccccggcaatatgggctccgccgcacatgatgctgacggccgctatcactgcgatcattttctgcttcatcgtttacctcctcttagtccttttacgaaaacctggagatagtatgtgtaaattgcaaagaattcatgtaacggcaacaaaaaaatgaaaacgcgagattgtttcatatatatgggtaacgtataatattttgtatgaaattcattaaatatacaggagaatgcgatatgaaaataaaattatctattttatccgcggcggttctggccgcaggcattaccgcctttgcctggccaaaaacagaggccaatgaaaaaacgcagacggacgccttgtatgtttctcccgcaggcagcgaccaaaatgaaggaacgttagaaaagccgttccgcacattaaaacatgcggctgaaaaggcagaggccggaacaaccgtattgattcgggaagggacgtacgatgaaacgtttgaagtaaagcacagcggcacggccgaaaagccgattacatttcggaactatcagaatgagcatgtctcaatcagcggcaaatctgcgccaaaaagcgattctgaaactccgttaattcaaatccgcaataaacagtacattaccattcacggcgttacgcttgagaacctctccgtatcatcagaagatgcgacggccatggggatctgcgtcaccggatcaagcagtcatatcaacattgacggcaaccatatccgaaacattaaaaccacggctgatgagggaaatgcacacggcatcgcgttttacggcacaggcgccatgaaggatgtcagcatcacaaataatactgttgaaaaactgacgctcggcgcaagcgaagcggtcgtgctgaacgggaatgttgacggatttaagattgccggcaataccattcgggacaataacaatatcgggattgacgtgatcggatacgaaggaacgtccaagcaaaacgactatgcgcgaaacggcgtcattgaaaacaatacggtgagccataactcttcttacggaaatcccgcttacggagatgaatattcagcgggcggtatttacgttgacggcgcagaacatgtggacattaagaataacaccgtttacaacaatgacctcggcattgaagccacttccgaacataaagggaaatacgcacgagatatccggattacggataacaaggtgtacggcaatgcttacaccggtatttcaatcggaggctatgacacgaaacgcggcggcaccatcaattcggtgatcgctcataacattatgtatcgaaatgacacgaaggaccttgacggcggccagctgttgctccagtacgatacaaaagggaacaccatcgaaaagaacatcatgacggcaagcggttcacggatttttatcgcaaatgattatacgaaaaacgaaggcaataccgttaatcataacgtctatcacaaagaagcgggaaaagacggcatttggaattggaagaacaaagaatatgattcattcgcagcgtacaaaaaaggaacggcaaacgattcggattccatttatgcggacccgatgtaccgtgacgaatcgtcttatgactttacattaaagcccggatcaccggccctacccgtcattcagtaacgaaaccattaaaaaaagccagtctatatcagactggcttttgtatttatacacgaaggaatttccgaatggaagtcagacttccccatactccgataaccgcgccgatcagaatgagcacaagtgatacttggaacacaaacggactgtacggcagaagtgaaacaaatgagccctgaactttcggggccacccaagcgaccatcgactggtacgtactcagcacgagagcgatcggtatgatagaaccgaatacccccagcagcagcccttccaggaagaacggccagcggataaaccagtttgtcgcgccgacaagcttcatgatttcaatctcttttcttctggcgaaaatcgtgattttaatcgtatttgagattaagaacatcgccgtgaacagaaggccgatgattaacgcaatcccgatgttgcgtgacaccccgacgatcttaaacagacggctgacttcttctttcccgtatgtcactttatacacatgatccagcttctcaatttttttcgcgactttcggcgtatcatgcggatctgtcgttttgacgataaacgcgttgttcagcgggttttcctgatcttgcattttcatggcctttccgctgtcgccgaagcttttgaccaattgatcaagctctttatctttagatgaaaactctacgctttggattcccgagatgtctttaatctcattctgcagcgtatcctgcgttttcttattagaagtcagatcgattaatactttaatttccacttctttttcagcatttttagccatgttgtttaaattcagcataatgactaaaaacacgccgaccaaaatcaatgtaacggtaacggcactgatggatgcaaatgtcatccatgtgtttcttccgagagatttaaaactctcacgcaaatggcgcccgagaattttaatcataagaaccatactcccctcttgactcatcacgcacaataattccgtcttcgatcgcgatgacccgtttcttcatggtgtttactatttctttattgtgtgtcgccatcacaacggtcgttccgcggttattaatctcttccagcgtcttcatgacttcccatgatgttaccggatcaaggttgcccgtcggttcgtcagctatcacgacgtcaggattgttgacgatggatcttgcgatggaaacacgctgctgttctcctccggaaagctggtcgggaaactgccgcgctttatgcttcagctgcacaagatcgagcacttcgagcacgcgttttttaatgactgactgctgctctccgataacctcaagtgcaaacgcgacgttttcaaacaccgtcaatttcggaagaagtttgaaatcttggaaaacaacacctattttacgccgcacgaaaggaatctctttttctttcacagacgcgagatctttatgattaatcaatatttgcccttttgtcggcttttcttctctgtaaatcattttaataaaagtagatttaccggctccgctcggtcccacgacatatacaaattctccgggatgaatcatgactgacagcccgttaatcgcttttacaccgttcggataggatttatatacttctttcatctctatcatgaaatcacctaatcttttaattatgtcttgcagccatagagttcgcaaacgtacagcggtttatggccgatttaccaggaaacagatgaaaaatctgaaagttccttttcctcagtacacttcattatacgtcaaatttagacatattactattacagtttcttttcattcccagaccgtgaaaaaaccttgcccctataacaggcaaggtttttctgttattttttctgtgacagccattttgcgatctcagcggcttccttatcatttacaagatggctcggcatattgccgcgtccgtttttaatgatgctttcaattttagcttcatcatacttcccgccgacttcctgtaaattcgggcctccgccgccttctaagtcttttccgtgacagccgatacagctttgctgataaagctcttctcctgctgacgcagaagcttttgatccgcctgagctgtcagagctttcttttttcgattcattggatccgccgcatgccgccagcaggacggacatggtcagaaccagcgccagcagcgcccattttgatttcatatgtaagatgcaccccttcgctattataaccccgtttacgcgcgtttgaaaccctcgccgagcacctcgcttgcgtctgcgacaataacaaaggctgactcatcaatttgtttgacgatttgtttcagttttgtgaattcggtctggccgacgacacacattaagatcggccggtcatgttccgtatacccgccgactgcggaaatcttcgtcacacccctgtcgatttctttaaacacagccgatctgacggcttcttcatgctgcgtaatgattaaagccattttggaacggttgaacccgacctgcacgacatcaatcgttttgcttgaaataaataccccgagcatcgcatacagtccctgctccactccgaaaacgagcatcgcgctcagcacaattaatccgtccatgatggcaaggcacgttcccagcgaaagccccgtgtatttgtgaatgatctgccccgccagagccgttccccccgtggagcctttgccgagatacacgatgccgattcccgttccgatcccgacgcctccgaaaatcgccgccagcagttcatgggtcgtcgcggcaggcagatctcttgttaaatagacggcgagcggcagaacgatggaaccgaccagtgtcttcattccgaacttcccgccgagaatgaccactccggcgataaacaaagggatgttaataatccactgcacgtaagccggttcaaaaccaaacgtttctaaaatggtgctgatcccgcttactccccccgctgctatacggttcggcagcaaaaatacgttaaacacgatccccgtaatcgccgcgccgatcatgatgtatatataatctttgatcagacggagcggcttattgtgattcacatccatgcaaaatcctccgttctccgattttctctcgatagcattttaagtcttcccggcttagaagtaaataacagccaaataccgtattaatttgctaaagcgctgttgtgaaaaatggaaaagagaacggataaaaaaacacaccttgccaaaggcaggtgtgttcccggattacgacagtttagaacgtaaataggcgtcaatgaagatatcgatatctccgtccataaccgcctgcacgttccccatttccgtattggtgcggtgatctttcaccatggagtacggatggaagacgtacgagcggatttggctgccccagccgatttctttctgttcgccgcggatttcgtcaagctccgcctgctgttcttcaattctgcgctgatacagcttcgctttgagcattttcatcgcccggtcgcggtttttgatttgtgaacgttccgtctggcacgtgacgactacatttgtcgggaggtgggtaatccgaacggctgaatcagtcgtattgacgtgctgtccgccggcaccgctcgcccggtacgtatcaactttaatatcttcggtacgaatatcaatgtcgatttcttcattgaattcaggcatgacttcacaagacacgaatgacgtgtgacggcggcctgatgaatcaaatggagaaatccgcacgaggcggtgtacgcctttttccgcttttaaatagccgtatgcattgtggcctttaataagcagtgtgactgacttaattcctgcttcatctcccgggagataatcaagcgtttcaactttgaaaccgcgtctttccgcccagcgggtatacattctgagcagcatggaaccccagtcctgggattccgtaccgccggcccccggatgaagttctaaaatcgcgttatttttgtcatatggttcactgagcagcagctgaagctcaaattcattcaattccttcgttaatgacttcagctctttttcaagctcttgctgaaggtcctggtcaggttcttcttttaaaagatcatgtgtcatttgcagctcttcgtgagactcgctcagctgatgataggagttcacgtattctttcagaccgttcgcttcattgatgacggtttgggccttctgctggtcattccagaattccggttccgccatcttttcatctaattctgcaatgcgggcttcctttgattcgaggtcaaagagaccccctgaagtccgctaaacgagaagccatattttcgagctctgccctgatttctgataattccattccattcacctcattaaaagatccggggcgccataagacgcagacccggtcatgttcgcttcatacagtcgagactattctgtccggccgcagcaatttttatatttttttccgcttccgcaatggcaaggcgcgttacgtccgatatccacaactttgcggaccggcgcttttttcgcttgtttggcctcatcgccgtcctgcggctgatgagccgtcgtttggccctgaacaacttcttcgcgttccagattgctttcaatctcggccttcatgacgaatttcgcaacctcgtcctcaatggactcaatcatgtgctcaaacatagcgaaaccttccatttggtattcacgcagcggatttgtctgcgcataggcgcgaaggtgaatcccttgacgcagctgatccatcgcatcaatatgatccatccattttgaatcgacggcacgcaatacgatgactttttcgaattcacgcatctgctctgtgccgaaattctcttctttttcattatattttgtcatgatgcgatccatgatcatctcatgcatttcatccggttcttttccgaagatatcgctcttttcaagcgcgccttcatcaagatacgttgaattcaccagctccacgaggccgtcaagattccattcttccggaagctcctctttcggcgtataagcggcaattgcacgctccagagaagacttgatcatgccttccacaatgtcacgcaggttttcagagtcaatgacttcaaaacgctgcttgtaaatgacttcgcgctgctgacggagcacgtcgtcatattgaagaagctgtttacgtgaatcgaagttgtttccttcgacacgtttttgagatgattccacggcgcgtgacaccattttgctctgaatcggcgtggagtcatccataccgaaccggtcaagcatcgccatcgtccgttcagctccgaaacggcgcatcaattcatcttccattgaaagataaaattgtgtgatacccgggtccccctgacgccctgaacgtccgcggagctggttgtcaatccggcgggattcatggcgttccgtaccgacgactgcaaggccgccaagctcttttacgccttcaccgagtttaatgtcggttccgcgtcccgccatgttggtcgcaattgtgacagcgcctttttgtcccgcttcttcaatgatctgagcttcacgctcatggtttttcgcgttcagtacctgatgcggaattcctttattcttcagaagtttagaaatcaattcagacgtttcaacggcaaccgtaccgacaagaaccggctgtccggtcatgtagcgctgggcgacatcctccgccaccgccttgaatttcccttccattgagcggtagatcaagtccggacggtcgtcacggatgaccggctggttggtcgggatggatacaacctgcatgttataaatattgcggaattcttcctcttccgtttttgcggtaccggtcatacccgcaagcttttcgtacatacggaaatagttttggaacgtaatcgtcgccaatgtcatgctttcattttgaatctccaggccttctttcgcctcaattgcctggtgaagaccttcgctgtagcggcggcctttcatcagacggccggtgaaggaatcaacgatgacgacctggccgtcctcaacaacataatccacgtctttctgcatcgccgcatgggcttttaaagcctggttgatatggtggttcaaggccacgtttttgacatcaaacaggttgtcgatgccgaacgttttttcagccttcgtcattccttcttccgtcagctgaacgcccttcgttttgacgtcatacgtataatcctgatctttcttgagtgtgcggacaaacgcatttgcctgcacgtacagttttgtggacttctgagcttgtccggaaataatcaatggcgttctcgcttcatcgactaaaattgaatcgacttcatcaataacggcaaaatgaagcgggcgctgcaccatttgttctttatagagcaccatgttgtcacgcaaataatcaaagccgagttcattgttcgttgaatacgtgatatcggctgcgtaagcttcgcgtttttcgtcttttgacatcgaattcaggttcaggccgactgtaagcccgagaaacgaaaaaatttctcccatttgctgggcatcacggctcgccagatattcgttgaccgttacgacgtgaacgccttttcccgtcaacgcatttaaatacacgggaagcgtggacgtcagcgttttcccttcccctgttttcatttcggagatgttcccctcatgaagggcgatgccccccatcagctgcactttaaacgggaacatgccggttacgcggcgggaagcttcacgaacgacggcaaacgcttcgacaagaaggtcatccgtcgtttctcctttttcaagccgctctttaaattctgccgttttatgtttaagcgcctcgtcagagagattttcataatctcctcttaaggcatcaatgtcatttgctattttttcgtatttgttcagcgcacgtttggtcggatcaaacattttatttaaaatcccaagcatctataacgctcctctatgttcacatgcagattttgcatggaataaatgataattttctgtccatgtatacctctcattatcataacataccttttgctatttccaaagaatttgcagataaagatagagaaaaaccttccgcgcgttcacggaaggctggatgggtttattcagtcggttcaattaatccgtatttgccgtcatttctgcggtaaacgacgtttgtgagattcgtctccgcgttggtgaatacgaagaaattatgtccgagcatattcatttggagaatcgcttcttcattatccatcggttttaaattaaaacgcttttgacggacaatttccgggctgtcatcttcaatttcgtcctgaaccgctacgcccgtatcagcagcgctgccgttctcgaaataatgtttcggaagaccctgctcgcggaattttcggttgacttttgttttgtgctttcggatttgacgttccagcttgtttgttgcgagatcaattgcattgtacatatcctcgttatgcacttcagaacgaagcgccagatcagtcatcggaatggtgacttcaactttggattccttatcattatagaattttaagttgacgttcacatcggcattgacgctctgctcgaaatatcgctccagcttgccgatttttctctccacatgatcctttaacgcaggtgtaacctcaatgttttctcctctgatattgtagttcatcaaagaacgcctccctttatctaaggatatgtaactatttctcttttaccccttctgatccctgctgaaacgttaaaataatgtgtaaattcggtgaacgatgacgaatggtgtcggttttatccggcagcttccgccaggattataagtatatgcggaggacgcaggcaaaagacctgccgcttgcagcaggtctagtgaagaacatacggtttgatgcagtcgtgcgtctgctccatccatagcttataatgcggcagaaagatggtttttaaaaactcctgaaaaggggcggacgggaaatcataatcatttaacatgctgaaatcctgaaagatctcgtcaaatgagcggatcgccgtctccacgcatcggcactcaatgatagacagcagaagcgcatgagaggaatcgagatgaaaaaaagcctgaatcaaatcgttgtaaatccgctcgccctccgtcttaaaaaaatcatcctgcgtgtccaacaggtagcaaagcccctcatcaatcgtaaaaagaagctggtaataggctgacaccaaatggtaatcgttcaaacttctcaaaacactcacctatttgcgtttgtcgtaataacggccgtcacttgtcgtttgatgatacggattgaaatacgtattatggtagattcgttttttcttaagcgtttttatttcatttcggataccatcctgaatccgtttcacttcgccggtaatcaggcggtccatcgcggccacctgctgaagcagcgttttttcttcttcggaaaaaggcggctgtatgcccgcaagcatctcctcccttttctccgtaaatgccgtaacgctgctgatgagaccgtcgctctccggggcgtccttcagtgcggcgtacatgttcttcgtttcgttatacaaagaaaagacattgctgttcatcaggcaaggccgcccgcgccatggctgtttttccgttcactctgcatggcctgcttccacgtatcgcgaaattcagtaacgagattttccgcttcatctaaaaactctccgttattctgcacgttcgcatcgatcagccggcggcggatgtaatcataaatggatgacatctgctcggaaatctcaatctcccggtttaacgtgatgctgagctcttgaatgatgttttgcgcctttacgatattttcatttttggcttcaaggttgttttgcttcatcgcctgccttgccagcttaatgaatcgcaggcagccgttataaagcataagggtcagctcttccggagcggctgtaaagacggatgtctgctgataagcagcaaaaggattatttattgccatttttataaaacctccaaggttatgatgttgaagatcctaacattgacgtgagatatgaagattggctgttcaatttctccaatgccgtatccagtgcgctgaactttttataatatctcgtttcgatgtcatccagcttcgttttcatattggaaatatttgtttctatttcattcaggcttttcccgatggcaaagctggttgataccgagctttccgtacccgcctgttttgtaatttgggtctgcattttgtttaatgtgtcttttaatctccgggcaatcccctgttcctccgggtttttggttttcgctgtatcagggctgtctgcattaaacagtttagccacgagagcaggattctcggtaattttctgtttcagtttcgcttcgtctttaatgacaagctttccttgatccgtataactatcagacgtctcaattccgaaatctgcaagctgatattttttcccgtcaatcgtaaccgttgagtacagatcaagccgcatctccgccaaaccgttctgcagcgtgctgtcgctccgtaataaaccgcttttggcctttgcttcccactgctcaatctgcttatcggtcatcgcttctctttgttcatcggttagcggcttataatcacggtattttgattccgacgccttctcgtttacacttttaattaacgtattgtatttatcaacgaaatctttaatgttgtcaaaaatgccgtccgtatcagtcgtgctgttaatcgtaaccgttttattgctgtccgtcacgctgttcagcgtgtatttgatgccgttgatcgtaaagttattggacgtttttgtcatttcaagcccgttgaacgtaaacttcgcgtttttcccttcggcattggccgtcagttcatttgttgcatcatcaacggcaaaaccgagctgatctttcagaaagcttttggttgcgtcatcacctgcggcaagggtaaatccttcccccgttttattggaagtgaacgcaatcgtatccacataatccgtgccgttggaaattttctcttttaaagcagtcactccgagacccgagctgttcagtttggaaatgacatcgtcaatcgtatcggttgcggcgatcgtgacgtttacctcagtcggcttcgtttcacccggatttgtgacattgaatttcaatgtttggctctgacccgaagtgaaattgatggcgcctgatgatttataagtcgtcggcgtagccagctgctgtacagacatactggttgaaatattctgctcagcactaacggccaccgcgctgacactggaatccgaacttgttactgtttttttattccagtttgtggacatcagcatattattaaatgtcgtagaatacatgtcggcaatctgggtattcacttcccgataagcatcgcgcttccattcaagcgtctgcttttgctggtttaatttattaagcggctgcttttcggcatccatcatttttttcaccagagaatctacatcaagaccggaattaaggcctgtgattcttgtgaccatatgtaccctctccttttcggcgtttagtcgtagacggctctatgacaacagtgagtttccgactgtttatcatatcacagctccataaatgtatgatcttattcttatatcggtcatattaaaaggttttcaataatttaactgcaaaatataatgtttcattttgtcaatagggttctttggcttgctgaaggggagatagctgaagaaataaaaaaaagaccctggagaaccaggatctttccgtcattaacctttaagcaattgaagaacttgctgaggctgttggttagcttgcgcaagcatagcttgagaagcctgagtaaggatgttgtttttcgtgtactgcatcatctcagaagccatgtctacgtcacggatacgtgattcagcagaagtcaggttctcagaagaagtaccaaggttgttgattgtgtgctctaaacggttttgaaccgcaccaagtttagcgcgctcgctagatactgtgtcgatagctgttttgattgttgtaagagctgaagacgcagctttagctgaagatgagatgtcgataccttttgtagcgtctttatttactgtagtagaagttgtagtgtcgcctcctacagtagcttttttagttaagtctgcgccatcaatagcagtagctttaacagcccctgttttatttaaagaatttagaacgtcttcttgtgaagcagtaatagtaccatcagctttttgcgctaatgttacagttactgttttgctagtctcatcataagacgcagttgttttatctacatcagaagttccagccgcagtgaatgaaattttaacggcttcaccttgatcatttcttacttcgagttcagagtttccatcaagtcctatcttttcgccaacttggccaataacttttaaagaatcagcgttcatgttgttgattgaaaggctcatagtttgaccttcgttagcaccgatttggaaagtcagtttgtcagccgtgccatcaagcaatttctttgtgttaaactcagtatctgtagaaattcttgtcacttcagaagaaagctgatccatctctttctgtaactcgtcacggtcagaagtggtgtttgtatcgttcgccgcttgtgtagcaagctcgctcatacgctgaagaatgctgtgagtttcgtttaatgcaccctcagccgtttggataagagagattccgtcttgagcgtttttagacgccatgtctaaaccgcggatttgagaacgcattttttcagagatcgcaagacccgcagcgtcatcaccagcgcggttgatgcgaagacctgaagataatttttccatgttttttgcagcagagtttgaacctgcattcagctgacggctagtgttaagagccgcgatattgtggttgattctcattttgtatttcctccctgaattgtttttcgcacgtccttgtgcatttgcgcagcgtcattctgaagaaaatttttcctctcattggctacactatatatatcggatggccgcttctattgtttatattgaaaataaaaaaatcctcactttttttgtgaggataggttaagtaataaatcagtattaaaagatacggctctgttgttctcttccaggatcgacaagtagatttctttccgatgaatatctacgtgctgaggcgcttcaattcccagcttcacttgttctccttcgatggcgatcacctttatttcaatatccggcccgatctgaatggactcattcacttttcttgagagaactagcatgatcctcctcctatcagatgttttgtttcataggaagcatcatgtaaaatgatttgtttcgccttcatttcctttttattgacgataatcggcgcttttaaattggcggtcgtgttttcaaaaggctcttccagcgttaaaatcgccatcacttcgacgtcctctatatcttcaatatgcaaaagttcaagcgtcgcatggtcaatgtcaaattcgtaccctttaaagaaaataaacggactggcgacaataaaggcgatgtgctcctgtttcacagactgcagcgccaaaaacggtgaatcttccgacaaaggaagaacaacaaattgagtctcgtcattaaatcccggcaggccgttttcaaatgagataatctgcccttcgtctattctgatttctccgtgatattttgttttaattatcatgcttcacaatcctttaccactttcatcttttattctgcgttgccatcgtcaaccgaaatcgtcaccttagggtcttgcatcatatcaatctgaactttccccggcgtataattccatacaggtttattgacggctgcttcaattgaaggtttgcgggcttcaatatcaatcgtaagctttgaaggaatgcagtcaatgtcgacgagaaactgcgcaggcagaaagtcgctgaattcgccgaatggatcgggcggtctgacatctgctgcctgccgggccatcacattgcccgttttcttttcgatagccgccatttccttcccttccctgactgtttttgcaataaactcgctgcaggcttccgcacctttctgggcggcttcagcgttcagcttttcaaatgatttgagattcaagttctcccacgccctcgtctggtcaatcgtcagtttggccggcgtgctttcaatgttcagctctgccggcggctgctcgatttccaggtcagcgggcggctgttccatctcgatttcttccttttgaaaggttataccgattttagcaggcacactgtcaataatcaatctcggcatctgcacagagatccctcctatttatagtattttagtaaaaaaagcgatctccctggtgtgagtcgcttttttatatattgaagacggtcagttaaattatttcagaaagtcaatcagtgacggctgaatgatattcgcattcactgacagcgctgctctatgaaccgtctgttgagataaataatcaacaattacatcttccatttctacatcttcattatcggacaatactttttcagcggttgccgcttgtgattccaatcttgtctgaatgagttccaaccggtttgtgcgtgcgccgatattggatttttcagcattcattttatcagtaaaaccgtcaatatctgacagaatttgatctgaatctgcttcggacagcgtgcctttgcttaaagaagcttctaaggagttaagaaattcaaaaacattatctccattttgtgcgacgcctccgaaagctgagtttggatcagaattcactttcagcactgctccgttcgagatgttgatgttaacatccgaagcaccggtataattctcatagttgtacgtatatgtgccgtcggcattttcagtgatcggcgggacgtctgaatttgttccgttaaacagataacgtccgtttacctgagtattcgcgacagaaacgagctgctttttcagctggccgatttctgtaccgattgctttcaattctgtttcaccgttcgaatcacttttcgcctgaaccatcaagtcccggattttccccataatatccgtttccgagtttacgcttgattccgagttttccagccatgtaaagccttgcgaaacattccgctgatactggtttacctgcgcaagctgagtacggtactgcattcccttcattgcaacgaccggatcatcagaagctttcgtgatttttttccccgtagacacttgctgctgaagccgatcgagcttgtcataacttgagccgataaatcgaagagaattttttgcgatcatcccttgagttactctcatttacttatctcctatcttcctccggtgcccataccgttaataattttatcgaatatttcatcttgcatcgttataatccgcgcagccgcattataagcgtgctgaaactgaatcatatttgtcatttcttcatctaaagacactgcactgactgattgtctccgttcatcggctgaaagggtgttgctttcagagttgttcataagattggccgctttttgtgaattaacgcccagctttccgataagggattcataaaagtcattaattgtagtggtttcaccgttaatagtcagcttgctgttctgtacggctgcaagatttgtcgcgttggtgccgtcacttttttctccgtttaacgacgctgcgatattatcagtagacgcaaggattttgtcactgacttttattttcgctgccgcaccttttgccggcaccgcttcaccgccgctgaaatcaaaaaatgctgcaccctgttcgcctgtataggtcttccctttttcatgaactgcattaaacgcgtcagcaaaggacagcgccatattgtcaagagccgtcagcatttcaggataaagacctttttcttctccgtttgacatatagccgtatgattcaataagacctaaaagtgagccttttccggtaaatgcatccgcattgaccgtactgctgccgactgacacactcgacacgaggccgctgtccttgtcgtagttgattttcatttctgaaactgtttttgtgttaccgtcgagcagcgtaccgagagaattgttgtttccgttcagcaattcgacgttaaccgtgccctcagcagtcgccaaggcatgtccgcccgacttattatatgaaactttaatatttgccatagaagataattgatcaatcaatctgtctctttggtcatacaaatcattagggagcataccgctcggctcaactgccgctatttgattgttaaggtcattcagctgattgagaatggaattgacctgatccgctgtgttatccaggttctttttaatatcaccctgaatgttagtcaaagaggtagatatatagttaaaactttcggcaagagatttcccctgctcctgcaaaactgagcgcgctcccgtattttccggattcgtcgccagatcctgaagggcattccaaaacgaactgagcgatccgtttaatccgttatcgtcaagctctttcatgacgccttccatttgtgacaatgaattggaacgggctgtatagtaccctaattttgtattttcagttctgtactgatagtctaaaaaactgtctctgacgcgctcaactgaaccggcttttactcctgttccaatttggccggccgtcagatcactgttttttgatactgcgggataagggctcgtcgattgtaatgtgacgcgctgcctcgtgtatccttctgtatttgcatttgcaacgttatttgaaactgtgctcaatgcagtctgctgcgcactcaatgcacgccttgctgtttccagccccataaaagtcgatggcattgaaaatcctccgttctaagcttttgaatcgaataatgtcaaacggctgacaggcttgcgcgccgcttgcggctctttataattcatattctctttttcacccggcatgatcatatcgaatgccccggagatgaattgtaaagcctgaatcgtgagctgtttgttcatctcattcacttctttcagacggtcaagaagcgcagacaaagagtgaaataacccttcaagctcctgtttttcactgcctgaagttctggagatgcatgcagcaattgtattgtcctcaccgcggctgagaaactgagaagttaacctgattcgctcttcctcagtctgcccgattgcctgaatatacttttgctctttggtcaatatgttggagagctcttttattttacctgctttcagcgcttccgttttctcctcagacagcgtgagcagatgttcatgcagtgcgcaaagtcgcttcagttgatcaataattggctttgctgacattggctttctcctttttattgctttttatagaaatttactatgttttcagcgatgctgtttgaatctattttatatgttccgctctctatatccgctttaagctgagcgattttttcctgtcgtgttttagtgaccgcatctgacgcattttgaagctcttttgcatgagaagaaatttccactttgtccttcggctttgcagcctctttttgtacggcttgcttttcgtaatttttttggtatggattaacggattgtgttccgtactgattgattttcataggattcctctcgctttctgttcgcagtctaattcttttatcgactgcgttatcagttagtttagggaatcaggtgtttttggtattataggcatagtatgtgtcttttgtactgtttttctcttcgaattcagcggctgttttttggttcatatggtctaattgcgactcaatatctgtctgacaggacttgcaaaatttccccgtcctgattggatttccgcacctttcgcaaggatatgccaaattcggaagctggctgatctgaatccttttttgtttgataaacttgaggatcagctcttcatccacacctgtttcctcagtgatctgctgcatcgtcgactgtctgttgatctgctttctcaaaaatttatagacggtttcaaatgctttttcttcttctttaatacatgcctggcacacggtctgcaggttcgttttaaaaaataaagcattgcattttggacaattcgccaattcacccatcgtattaactcctattccttctttaatctgccttatatttctattaattatatcggcagaaaaaaagaatgatttagctcctgattaaagtaaaagaggagaccgatgacgctttgcccgctgtcagcaggacttcggcggcttggtgaagtgtggcgcccgtcgtataaatatcatctattaaaatgacgttcataccttcggcggagttttcggctgctgaaaactttttttctgcagacagcctgtctgttttgctctttttggattgtttttcgttgttcagtcggatgaggggggaaatgacgggcattccgagcagagaggccagcagctcggattgattgaatccgcgttccgccagccgttcgccgctcagcggaatagggatgagagtatgtgtatttgatggatatgccgctttaaagccggcagcaaagtcacgtccaaatgcttgaatgattttcgcatcacccctgaatttaaaacgggccaatgagtccttcatcgcatcattatataaatataccgaacggttttgccgcagcaaaaagcgcttttccgtttttgattcccgggccgcacaatcagcgcatttttcattagactcctgaggcctcccgcatatactgcatacggggccttcaattttttcgaattggctgctgcatatgctgcatacctcttgctcgggcgccagagaaaacagagatctccaagtcaatgaacttgaaattggtgagtcacacaataaacaattcagagatattacgctccttcccgagtttcacagaactcgcttggattaaccgaaacaatcgccgctgattcagccagaatgacaagcagcgccgtatttttctgtttatcaactatctctgcttttgcataagcaactttctttttatctgtaacatatgccggttcagcccggtttagtgaaagtgccagtacatcatttttgcatacccggcatgtgcatttcatatgaagcttaggcatatggcggtcgagaagttcctttaatatgatttctttagaattgacaagcatgctgacagctcctcataggaaagtatgagtatactgtatcacgttttctgaaattaactagtccaacaatttacttttttgtgccaatttgttcatatgttctatatgtttttttgcttttttcattccgtttgtcattccgaaatgaaacatgacgacatcaccgctgaaatgtttataatgccttcccgttctgcccgcgatctgtacgagcgcgctctcagtaaagataggtgcttctgcgccgaggacacatgtctgaactttgggcacggtaacccctctttctaaaatcgtagtcgttaccagcaggtcaagccggccgtctctgaaccgtttcactttatcctttctgaatgtgtcttccgcatgaatgccttctgcccgtatgtttaatttctgaaaataatccgttgtctttttcaatacgtgtacagacggaacgaataagaaaacaggcagctgtgattgaagtttttggcaaacccaatccgttacagagcgcggcagttttcctttctgaagcttcttcttccaattgccgcaccacaaaaaacgcggctccgggaggggtttccgatgatatctggccggtatgcgaacgcttttcagcaaacctgcttcagcattcttttttaatgtgtctgaaggagttgccgttacataaacaagggcgctgtttttcttcctcgctttatcaacagcgaaccttaatgtctcatcggctgaaaaaggaaacgcatctacttcatctattatcatgacatcaaaaatgtctcggtagcgcatcagctggtgagcggttgaaatcatcagcggagtcagacggcctttgtcctcgctgccgccgtacaaagcagaaacgtcgactttctcaaatgcttttttcagtctcggcagcagttcaagtacgacatctgtacgcggagtcgcgacacagacgcgcaaaccgtgattcagcgcaaactcgatacccggaaacagcatctctgttttccccgatccgcataccgcccatactaacagctcttgtctctcttttatcgcatctgtaagcgcggcggccgcccgcttctgtccgtctgtcagtgttccttcccaaaaaagctttacaggctcccagctgttttcagaggcttgattccaagaatataatgatgtcagttcatcagcccttcccatcatgacacaggcacggcaataggtaatctgccttttggcagaggacgcccaaaatgccgcaaagcaggcttgatcaaactgaccgcatcgttggcagacgtaacggtttttccggcggatgattgacggctcggccgttatatactctttttctataaaacgcttgatgcgctgatctgaaaacggtatctcagatctcaataaatgccggccgtaaaagaaatcccgcacctctgaaaattctgaagcaccttcggacatctccctgcctcctttctgctcaaagtatgcctgccgggaacccacttgtcgaattgcgaaaattaaaaaataaaaaaatctccgcccttgaaaacggagattttcacttagtttttaaagcaccagccgattccgatggcgccttcgcccaaatgggttccgatcacggcgccgaaatagctgttatagaattcgacatgaggatatttaccgcttaactcctgtataatagccgccgcttcttcttccctgtttgcatggatgacagcggcccgcatcgggattcctttacttgcatcctccccaaacagctcaaaaattctcgaaatcgcttttttgcgtgtccgaatcttctcaaaaggaacaattaccttattgtcaaaatgaagaataggctttacctttaacagaccgccgataaaagcctgagcactgcttagacgcccgccccgctggaggtgtgataaatcgtccaccataaaatacgcacggactgtttttttcatatcatccagctcttttataatctcttccggtgagtcaacaccgtctttaatgagctgtgctgcctttaatgcataaaaaccttgtgccaaacagctgatctctgaatcaaagggataaactttaatatgatcaaccatagtgtttgccgaggcggcgctgttatatgttccgctgattccgctggacaaatgtatgcttatgactgcgtcatatgttttgcccagttcttcgtacaatgcaattaattcaccgaaagaaggctgagacgtagtcggcagctcatcatgattttttacttctttataaaaacttctccagtcgagttctgtttcttcgcggaatgttttttcaccgaaaaccacttggagagggatcatatgaatatgatgttcttctctcatctctttcggaatatatgctgtactgtctgttaaaactgcaatcttcatcactttacctgccttattaagtacttaataagtattttaatagatatgcagctgtaaaaaaagacttgccataacaggcaagtcttctcacacatgactaacgcatctctacccagccgtttttaatagccacgacaacggcttgtgtccggtcattaacgttcattttctgcaaaatattactcacgtggtttttcactgttttctcactgataaacaatgattcaccgattccgcggttgctttttccgtctgcaagcatttgcagcacttcacattcccgtctcgttaatatatgtaatggtctccggatttccgggtaaacctcatgctgaggatgagcagaaactccgcttgtcgcaagacggcggaattcgttgacaagattgtgggttactttcgggtgaaggtaagaaccgccctcggctaccactttcactgcttcgattaaagtatctgcgtccatctctttcaggagatagcctcttgcacctgtttttaaagcatgagtcacatagttttcatcatcatggatggagaggataatcaccttagattcagggtacagctcaacaagctgtttagtagcctctactccatttacattcggcatattgatgtccattatgacaacatcgggatggtaatgctcgacgattcgagccgcctcatctccatcgtcaccttctgctaccacttcaaaggtaggttcaaaatccaatattctttttacaccctcacggaatagttgatggtcgtcgataataacaatatttactttagtcacacgctacgcctccttatcctattgttctatatacgccgctgttcggtcaatatgtcttttggctctatttaacaaattataggccgagagataacggaaccttaatcatgataaatgtcccaagacctattttagagtctatcgttatcgttccttcaagcagatctactctttctttcattcccagcaagccgaatgacttgtttttcttttgtttagcatccttaatatcaaagccttttccgttgtccttaatgatgagaacgacaaaatcagcggttacttccacttttactgtaatttcctctgattctgaatgcttgagtgcatttgtgacggcttcctgagcgagacggaaaagcgccacttcaaattgcggggcaagcctttggttctccgtgtctccgatacactgaaaatgtattttcacctttccgttgtattcttcagttgtataaagatattttctcagtgtcggaatcagcccgagatcgtccaatgccatcggtcttaaatcatatataatccttctgacttcgtaaagggcattccgcacattctgccgcagatttctgatttcctgaaatccgtcctccgtgccgcggtcgcggaagatccgttcaattaattccgatctcatcatgacatttgccagcatttgcgcgggaccgtcatgaatttctctggaaactctttttctttcttcctcttgggcttcaataattcttaaaccgaaatcttgtttagcctgcgcatcggcaagaagaagccctacttggcgaaggtcttgattcaggtaattcagaacgacggttatttggctgaccaatgattctgaccgttcaatgatttcctgaagccccaaaagccggcgttctaaatcatctctgcgctcccgcagctgcttttcacgctgctggatcatcgtcagttccacttgaagtttgtgcgccttttcataggcgttgcgaatttcttcttcgctgaacttatggaaatttctgcttacttcagacaagcggtttcgtgcgtgccgcgtatgaacttcaagtttgtcgcccagctcaatgacttcgtagacctgctgtttgatctgtttgagttcttcaaccagctgctcatattgctggcgcgactgctctccgatttgaaaaacctcgtccttactcccgtccacggttttcagcattttcataagtatagaatccaaaactttggagtccatcttcgatttattcatctgtctccctccgtaacggtgttgttatgtatttttattataaatgtaattgaactgcaatttatgtcgaattataatgaaagaatgcgtatattctagaaaaaaacatttttatatagtatcttactctttcatgataccaaaatatgcgcaaaaattctaaagtctgttcgaatttgtagaaacaagtcttttaatgcttgtcaggagggtccagcaatcatgctgcacagctatttaacagttaaagaaacgggtgaacatgagattgtgattgaaaaatcgcgttttatctgtcacctgagccgtgctgcttctgaagaggaagcgcaggaatttatacaaaagataaaaaaacagcactggaatgcgactcataactgctcagcttatctgatcggcgaaaccgaccatatacaaaaggcgaatgatgacggagaaccaagcggcacagccggcgtccccatgctggaagtgctgaaaaaacgcggtctgaaagatacctgcgcggtggttacccggtatttcggcggaataaagctcggtgcaggcggattgattcgtgcatatggaaagtcagtgtctgaaggcttaaatcatataggagttacggagcggaagctgatgcggattatgcatacatcagcggattatacgtggctcggcaagatagagaacgaactgagagaatcagtttttttactgaaagatatccattatgcggatcatgtcgaatttgaaacgtacgttgaagaaaaagacaaagaagcgtttctaaaatggatgacagaactgacgaacggcaagagtaagaatacagagggagaactgacgtatttagaaacagacgtcagccctaaaggagactaatgtaatggctgaacgtgtaagagtgcgtgttcgaaagaaaaagaaaagcaaacgaaagatcatattcaaacggattttgctgctgcttaccctcgttttgttagtcgctgccgggtttggcggatacaaagtatacaaaacgatcaatgcggcagataatgcatatgatgccctttcccgcggagacaaatcaaaattacgggataaagtcatcaatatgaagaaaaaaccgttctccattttgtttatggggatcgaaaattatgccacaagcggaaaaggcggacgatcagattctcttattgtcgttacccttgatccgagaaataaaacaatgaaaatgctgagtattccgcgtgatacgcgggtgacgcttgccggcgacacaaccggtaaaaaatcaaaaatcaatgcggcttttgctaagggcggagcggatgaaaccgtctcaaccgtcgaagacttattaggcataccgattgataagtatgtcactgtcgacttcaatggctttaaggatgttattgatgaagtaggcggggtcgatgtaaaagtgccgtttgacttcgacgagatgagtgacgtcagtaaaaagaaacggatctatttcaagaaaggaaacatgcatttgaacggtgagcaggctttggcttacgcgcggatgagaaaacaggataagcgcggagacttcggccggaatgaccgccaaaagcaaatcttaaacgcactgatcgaccaaatgtccagagctggaaatattgctaaaattgataaaatcgctgaaacagcgagcaataacgtccaaacgaatatccgaatcactgaaggactcgctcttcagcagatttacagcggctttaccagcaaaaaggttgatacactgaccataacaggatcagatttatatttaggcggaaccgcaactacgcgcggaacatattatttccagccggatccgaccaatctcgaaaaaatacggcaggaattgcagaaacatctggattacccgtccggaaacagcacggcatccgatcctgcttctgacagcaccggaacggacagtacgactgattcgacttccgacagcacgggaacaggcggtacggctgattcgccttccggcagcacaggaacaagcggcacgaccgattcaaccagcggtactgcaggtgaaaacggtacgggcagcacacagtccggcggcacaacaggctattaagagtaaacccgatcctttgagcaggatcgggtttttttatataataagagaatagcagaatccacaaaaaagcagaccattcgcatgatctgctctttttagtttttcttcaccaatctcttgtaaaacttggtaaatggtttaaattgttcatttactaaccctgtgacctctgctatgatttgcataaatacaatcaatacaaaaataataaacagcgaaagccatatggtcgcgcttttcagcaggatggcactgacgctgaaaataaagccgattaaataaatgataatgacagccgtacggtgtgacagcccgaaggccatcagccggtggtgtatatgtgacttatcaggcgctgagatcggctgtttgtttaaaatccgcctgatgacggcgaatgtcgtatcaaaaatcggcacgcccaaaatgatgatcggaatgatgatactgaataaagtaacacttttataaagacctaataatgagagtactgagatgacgtatccgagaaagagcgatccggtatctcccataaatatctttgccggatgaaaattataaaataaaaatccgagtgtgcttcctatcacgacaagtgaaagtgacagaataaggattttccctccggataacgccataacggcgatagtggagagtccgatgaccgacaggccggcagcgagtccgtccaaaccgtcaatcaggttcatcgcgttcgtaataccgacgatccataacacagtcagcgggtaagcgacccatcccaattctaaacgttccgttaaaaacggtacggagaaaaagtccattttcagtcccgtgctcacaatcataatggccacggccagctggacgaaaaactttacctttgcgcttaattggtatttatcatcaaggattcctaaaataacaataataaacgcacccactgtaatggcggtcattttcgtttcattatatatgccggccgcgagcacacccgccgctacgccgataaagatggccaggccgcccatacggggcattattttatcatgtacttttcggttgctgggctggtcaactgcacctattttgatcgcaattttttttacgataggagttaggattaaaaccgttagcagagagacaaaaaacgcaacaactatgcgaaacatgcgttcgtcaagcataaagaagtctcctttggaattatatgaagtcttttctgatattgaaccgttccttccattataattcttactagttattataacaagcatcatcaaaaagaaacacgcaaatcaaaaaatgcgctttcccttttaatgggattgcgcatttttcaatatacccgtgcattcgagcattcggccgaataaaacattccaatcccgtctccgggccaattcacggcgcaaagcctcatatgatccgctgcggtccgctgccagaagcgcgtcgcaggccgcgatgaaatctgcggggtcactgccttcaacgtattcatagacgaaaggccttttgatttttgacgtagaagaaaggttgcagccgacaaccggtttcccggcggctaaaaattcaaaaagcttaagcggaaataccgcgtcattataaggtgaatttttatacggcatgatgccgatgtcgacaagctgcatataggacggcacttcattcggcgcggcaggtcccgtccagatgacattcggacgcttcagaagcgacttgaaatccggatcgtcctgagccgtgttcgggcctaccaataaaatcgtccagtcaggcctcacatctgccgtttccgccataagcgcaaaatcgagcttcggtttgattccgccgataaaaccgagaaccgttccgttccgtccccgcaaaatgtcttcatccggctgtttattttcccgtgaaaacaggtcatattccactccgttttcaatggtgaacactttatggtgcgggttctccagcttttttccgacctcgtggtgcagacagtcagatgtacacgtaatggaatcggcacgctgaatgattctcatttccgcctgtttaatgatgtttcttctaacatttgacagcaccccggaccggccgctgatcggagcggcccacagatcactgcaatcgtaaatcacttcatcccaaggaaacagatctgccagaagcggaaaaccggggaaggtgtaccataagcagcagcgggccccttctccttcttccttcagcatgttcaacaatggtgaaagcttatgcctgtagcacatgtcagtatacctgccgaagcgaaaagctttttgcttcatgagatcctttacagtgaactgccggattccctcggaaattccggtcatctgtccgtcatttgcgcgcggagacggacatacccaaatgacgcttttcgtttctttttgccgggcgagaaattcagccagccggtgccgtctgtatctcagccggtcatgaccccattccgccgctccgacgattacgtgaataatcggttccaccttcatcacccagctcctctgacgcctacagtcttttcaagaccgcgtttttcgcatattgcataaaacaccacgaagccttgataaaatgcaggcgctcaatttctctatagacaaaccatgtttttttggcggctttccacttgttgcttgaaatcgaattctgcacaagcctgtattctgaaaggcactcattcaggccgtaagccgtaaatccccttttcagcagggaaagccatgtcgctaaatcctgccgcgttctgatatcaggcatttgaatctgtcccgtctgctctctgtcaatcatgaccgttaaacatccgataatcgtgttttttaaagcttcatcatatgacaggctttcaggggcttgaatcgttttgtccgtcggcgttccgtcctgctccatgacgctgtagcccgtaaatgaaaaagcgcaggaccgctctgccataaacgcaagctgtttttgaagcttttcctttttccatctgtcatcgctgtccagaaatgcgacataacggcccttggcatgtttaagggctgtatttctggcagccgcggctcccccgtttttctctaaataaacgacgcggatccgctcatccttttgttcatattgccgtaaaatatctctcgttccgtccgttgaacaatcatccgcgataatcatttcccaatgcgggtggctttgatgtaaaacagactgaatcgtgtcttcgatatattcacttgcattataagacggtgtaatgacagatacgaaaggtttccagtttgtcatggtcacatctccatcgcagatttttacaaggactctctaaaaaactcaggaatgacaatgaacataaatgcaactgcaatgccgattaaaacgcccagaaccgctttccttttcggcggcatgccttctcccgccgtttcattcatcggctctgaattgatgatgccggccgctttcaggttcagctgcgtatttttcaattcgtataaaaatcgttccttatccactttggcgtccgcgctgacggtttctccttcaagcgcagcaatactctgccgcactacttttgcccgtttttcaaacaggtcctgatcattcttcagaaaagttgttatgacggcttgaaacaccgattcggtctcctgtttgttttggccgctgtagctgaccgtgatcaatgaatctgattgtgtttcgacagtcagtttacttttcacggccgctctttcttcgtctgttttatcaggcaaagcctgctttaaaaaggcatcgctcgtcaaaaggagcgggatttcttttgtattgttataaagcggatgatcataatttcccgcggcgatcgcggcttctgatgtaaaactgctgctcccgctgatttttgacggcaatacatatcccgccgcccctaacacaacgggcagcgcaatgatccaaataatattctttttgatacgccgggttattcttgtcaacatatccttcatctcgcatctccctgtttttcatagtacgccgtgacggcaggctccttttgtaaccccctcaatatattgaccgccgcgatcacgagcgagagaaatacccagtggaaaaataaatttgatacggagcttgggctgatgctgcttaccaaaaaaccggccatcgccgtgataagtccttctgtgatcagtcttgactgattttccgattttctttcatgacatttataaagtgtccaaaaaaggaacaaatagactgtcaggtaaccgagcatcgtaagcacgccgaagttcgccataatctcgacgagccagttgtgcacctcaactacgccgcccgtatcataaacgggctccgcttttaaatagtaagagacgtttccggcacccactccaaacccccaggaatcaatcacatagtgaaaggcgttttttaaaagattcgccctcgcgaggttggaaggaagcggttgctgtcccggcatcgcctgcggagctgaaaacagattcaagacggcgttggtgatacggcccgcaaataaaaccgcaaacagcgccgcacccgctcccgttgcgtacagcgcgagctttttcaacagggaaggcagcagaatgaagacgtatacagccgcccccgcgcatatgcccagcagactcgcgcgcgaaccggttaaaatgattaaatacaaagcgctgatcgcaaagagcaggctgacggccttcacatagccgtttttcatatttttcaccgccgccgcatacagaaagaaactgatgcacaaaaacgtcgcgaaatcattttgattaaagaaaacggacgtcggataatgctgtttgtactgcgggccgttataaagcgtggagctcggcagatggtggtgtgtaaaatggttgtaaaagccgatcgccatcacaaaaatggtcatcacaagccatatgccgtaaaaaaccatcagctgatcaaagcgctgaatgaacatgacaataagataaatcagaaacatgcccattcccattaaagctaaatatttaatcccgtacgtcacggattttgcccacaataacgataggagaccgtatgtaaaccataaggcgaaaaacatcagaaccccttttacattcacccgattccatctgtcaatatgatgacggtttgttaggatgccggcgacgtgaagggcgcctgctccgattaataacagccggtatataaataagctgaaaaaaccgagatggaccgcaaagaaggcctggtttaaaaatgtacacgcgatcagtatgtaaatgagccccataaacatctgaccgtttgttgtaaaggcggatagcaaagcaagtcccgcaatgccgatcatggcggcaagcagcagcacggtgatttttccgaagccggcatccgccctgaccgcctccagcatgatgaatcctcctgtaatgagagcggcaagcagcacaagaacatgtgccgctgaacgtttgatactcacatggcaaacccctttccaaaaccggcagccgagccgggctgccgagagcctgaagacaaatctttttctatcttgccagttcttttatttgccgatcggcatgaaccgccggacgtccgacggaatgataagtgaatcctgaaatcctcatatactccagcggaaacatatttctgccgtcaatgatgaccggctgtttgagcagctgcttcactctctgaagatccatctccttgacttccggccaatctgttgtaatcaggcatgcatccgcgtttttaatggcactgtacagctctgtgtgatattcaatgccgccgtctcctaatatcgctgacgcttcgggaatcgcgatcggatcatacgctttcacgtgagcgccctgctctttaagacttgtgatgatatcaagagcgggggcggagcggacgtcatttgtgtgcggtttaaaggccagccccagtacggccgcggttttcccttttaagggaccgatggcgcggttcaatttttccgtaatacggacccgctgcttctcattggtttcaatgacggcttccatcatttgaaacggatagccggcggcgtttgcgatatgcaataaagccgttgtatccttcggaaagcaggatccgccgaatccgatgcccgcctggagaaatttattcccgatccggctgtcaagaccgacgccttctgacacatgggaaatgtccgccccgacacgttcgcaaatattggcgatatcgttaataaaagatattttggcggctaaaaaagcatttgcggcatacttaatcatttccgcgctttcaagattggtctttacgatcttcgtacggaacggcttatgaagctcttcaatgaccgaagcggcatgttcgcttgtggcgccgatgaccgcccgctccatctgcatcgtatcccgcaccgccgaaccttcgcggaggaattcaggatttgacgcgacatcaaacggatattttccctttgacgcttcgctgacgatttggtaaacgagctttcccgtcccgaccggaacggtgcttttggtgacaatgattttgtatccgttcagctgttctccgattgtttgcgccgctgccttaatgtaggtcagatcggcttcacccgtctttgacatcggcgtaccgacggcgatatagatgatatcagcggctttcacagccggcccgatttcggctgtaaaggataaccgtccggcactgacatttttttcggctaattcctcaagccccggttcatatatcgggatgactccgtttttcaagcttctgattttcgcttcattgatgtcacagcaagtcacatgatggccgatttccgcaaaacaagttccagatacaagacctacataccctgttcctaatacagcgatttttttcacagcttcatccctctttcgaaaggttctcctcttgcccggcccggttcattacggatcggtatttctctttcagcgctttcgcgttgtggcttgcgtcaaaatacgtgcggacggtttgataaagttcctcggctgtttgcggcgtccaagcctctccttcgtcatattgcagaatcgattctgccagcgtctcaggtgaacccggcttgatcagcaacccccggtgtttcccgaataaagaagccaatcctccgacatcggtgcaaatcaccggcaccttcagagcgagcgcctcaatgaccacagtcggcatgccttcgctgtaggacggcagcgccattacatccgaagccagcagatagtcctgtaccttgtcgttcggcacttgccccgtgacgatatgagcggcttcacgcaatgaagatgcggcgggaccgtcaccgacaaagacggctccatatctttcatccaatgattgaacggcttttgataagtcgaaaacgcctttctctttgacaagcctgccgatgaacacgatcagttttttatccggaggaaggccgagccgttttctgacggcttctttcgtctcgttcctttttcggaagtcgtcaagcgtgatgccgatcggaagcacgctgcactccgcttcgataagctttttcatttgttcccgcagactgccgctcacagcgtaaatatcggctgcttcccgcaccgcaaatgtaaatgcgcgatgagcgcttttgctgtaatgcggatagacattgacatcactgccatgcaaggtcagcacatatggaatgcctaaagcctttgacacaatggcggccgctccgcctgacggcatggcgaaatgcgcgtgaatcagatcgggcttcaggccatgatttttgatttcggaaagaatggattccgccattcttttatgcggctgcgcccatttcagctgcccgggaaccgcctgataaaacggccggtggacggacacgcctttccgccattcatgcgccggcctgatatccttttgccgatacgtctttttcagcacccggaatggcgcggcgagtttcggccgcggacaaatgacggtcatctccgcgccaagctttctcagttcttgggcctgcgtctcatgaaaaacgccttcccccggcttctcactgctcggatagacacttgtcatccacaataccttcatagcaaacgtccttttcttaatttacttttcatatgcggataagcttttcctaacaggaataaataacacaacgcgccgcaggctacggagatcgccagccgcagcttgacatcaaggctgatccgctccgtgccgaagctggctgtaaaggcgatgacacccattgccgccgtaagcagaaacggtttggccacggctttgaagtaagccgacagccgcagcttaatgacatatgccaacagccagcgcccgatcaggaaattcaggatgctgatgaaagcgtacgtccaggctaccgtcaagagatttccggacagcacggcggcgtacaaagatgcaccatacagcagcatcaccccggcgtcccaataaaacgccagatcggcccgcccttttgcgagcagcacagatccgttcggattcatcagaacccttaatatcccgacgatggcgagaacgtttaaaaccgggacagccgccagccatttttctccgaataccgaagccacgaatgcatccgacactgaaaccaaaccgagcaaaagcggaaaggatatcagcgcgagtattttggtcatattgagaaatccttctctgataacgctgttttcatgcttgtttttcgcaaagacgggaaacgcgactctcgtaatgatcggattaatttttaataccggaagcgtgacaatctggtaggccagattgtaaatgccgagcgcctcagcgccgataaaactgccgatcagaatcatatcaatattcgctccgagccggttcacaagccgggaagacagctgaaaggccccgaaagaaaagaagcctttcattcctttcagatcaaaaaccaacgccggtctccatgtttttctgcaggccatccagtacagaatccctttcgacgattgcagcagcacctgggaaatcacataggcgagaatcgggtccgtataaaaaaccgcggccgccaaatacacgaaggacagcacatttgaaaagatttcaatcttgcttaacgtgttaaatgccagcgctttttgcagcatatactggtattgctgaccgatgggcgcgattaaaaacatgacggccagcacgcggattaaatagacaagctcctcccgccgataaaaatcggcgatgagcggactgctgaaaaacagcagcgcaaacagcgcaagccctgttacgatattcagccagtacaaggaagacatctgtttatcagtcacatgatctttttgaatgagcgcggcgccaaaacccatatcaagcgcaatttgggcaaacaccactaccgttgtgatcatgccgacaaggccgaattcagccagtgacatgacccgcccgagcagggcgaattggatgatttgaatgaccgtaatacacgctgtcgaaatacttgtccatttggcgccgctcaagatttgatttgtaatactaggcatcgttttccctacttttttgtctgctgaccagaatttttatcgcgccccgtcaccggtccagatcactttgcacgttttgagcataatcttcagttccaatgaaaaggtcaggttgcggatataatataagtcaaacattagtttttccctcggtgtcatgtcatatcccccgttgacctgcgcccagccgcttaatcccggcttaacggccagccgctccgtaaaccccggaatctcagcctgaaactgttccgtaaacacgggccgctcgggacgcgggccgatcaggctcatttctccccgaagcacatttaccagctgcggcagctcatcaatacgggtccttctgataaaagcgccgacctttgtcacgcggggatcctttttcagcgcccagaccgcccccgatttttcagcatctattttcatagagcggagcttatacaaataaaacggcttcccgtctttgcctacccgctcctgcttataaaaagcagggccgggcgactccaaacgaatcagtatggagaacaggcccatcaccgggagcgccgccaagagccccgcaagcgcaaacacaatgtccatgaatcgcttaaaagccaaataacgggccgttctttccgtaacggcagcggaagtcccctgccgcactgcatagttattatttacattcatgcttttctctgctcccactgacacacacctcacgatttgttgggatgtttgatgacctatgccgtgagtttagcagatggatgttaattggaagtaaaggaagcgttaatgtttattagaatgtttcgattattgtttttttattgtaaatctattcatatccataaacagcggttactataattgaaaaggatcacaacgaaaaagcctgccgatcaattttgaccagcaggctcgtacacaaatatataaaagttttacttataataagacacgattccatcattgatggctgcagctgccttttccttataggatgcttgctttaatttacttgcatcagacggattcgtaataaaagccgtctctactaatacactaggcattttggaatacttaatgacatagaacggagctgttttaacctctctgtctcttgtttttaatgcattaacaaccctaggctgaatttgtcctgccaggcgtttgcttgcagcggcttgatatgtctcatcatagtaggtctcagttccgtttgcagaagttgcatcatttgcattgccgtgaacgctgataaataaatccgctcctgcggttgcacctttatttaccctttcctgcaaggaataaaatgtatcattagacctcgtcatgaccggcagagcacctgaagcatttaattttgtattcagccttttagcgatatcaagattgacgtctttttctaaaatgccgttacctatagaaccggaatcttttcccccatgacccggatcaattaaaattgtttttcctgctgccggatttttcagctggtttgcaacatttgagctgacagccggggtattcccgataatggtaaagctgcttaatttttttctcccgataaagactcttgtttcttttgaaagattgctgccgtttgtcagaatgatagattgttttttctttgcagcaagagcagcacccgctatggagtctgcatacccgaaaccattgctgacgaatacattgcctgtcggaagatttaattgctgaactagattggccgcaagttcgtatcgattgcttccgctgattctttttggagaagggagttttttaaagacagaggcatttatgctcccggttccccctgctacaatagagcttttgatccccttgctttttatagctcctgctgtggcactgttgatagctgttttattcgtaaacaaaattggatatccgttctttgcggcatatggaattgcagctattgcgtcagcatataaaaatccgtttgcaataacggcttttgaggcggcaggcatttcctttgctactttagctgccgtatcatatcggttgcttcctgaaattctcttaacactgatgccgagcgctttgatttgatttgctgtatttgctgacacagcaggcgttccgccgacaataatgaccgtttttgtttttaattctttcagacgggttttcgtctctgatgacaaattatctttgtttgtgtaaagcagcggcgcatttttctgatatgccatcggggcagcagatatagcatctgcatacgaacctcctccgacgacaacagctgtactcgctgttgaatacacctgcttggaaagcgcagcagccgtaccgtacctgttgcttccccctactcttttaaccgcgttgtcagctaaggctgacgggataaataagatgagtcccagcatagaaatgatcaggactttaagataagaacgcaattgccttcctcctgctctcgtttatttaatagtcagtcaatgtggtgcccggataataaaattttaaaattgaactatatgaatctcccgaatccgctcttgccttagcgccgtattggctcataccgatgccgtgtccatatccctttccgctgattgtaaaagcagaactgttttgactgacggtcacataagtgcttttaaacacggaggctccgatcatcgttctcagttcagtcaccggcacagtcattgcagatgttttatttgcctcgtaatttccattgttttgtttgacagcgtaattcactttcaaagttgctgttttagcccgctgtcctttagttgttccgctgaatgtaagatcttctatttttaaaattttaatggcggaagcgcccgtttccttatttttcagaatccaatttttaataccgctcagttgagctgcatttgtctcattctttgaagcaaaccaagaggccggcttatttacatcaattgaatccggattgatttgctgcttagaaagcgtcagactccaggcagtttgaggatcttttgtgtcttttttcgcagttaaataaggaacgcttgaaccccatacttcgccgcttgattctgtataaccgccattactcgatgaataagccgccgtaattaaattccctttgtaagtcagcaccttattttttgtctgctgcaccgctttcgttgtattggcattccagctgtacccgccatatacttgaaaagcagtagtatcagcaacagtgctcccggtcttcgtaattgagtatgttcttgccgcaaccgtttgcgccttcagcgcttcaagagaccagcttgcaggcatttcattcggtacgacaccttttaaataatcttcaaaaggaatgttttcatttacaggtctgatatatttgcctgactctattgaaaaattaaccgtccccaagtattcttttccattcaaactgatccggttggattcattgtacgtttccggttttattctcaatgaattcccatatgttttaatatgattaagatttaactttccattattgatttgtaagttgtatgtgcttccgccggctaagtaaaaatggtttgaaagctcattttcaaccccggcggaaatggagcttgtgcttccgataaagtcgtatgcatacgacgccttctcttttgtcactgatttagctgctgaaggaacatcatcttgtttgatatataatatttggctgttttttttggcggctaaagaagcgccaaccaggacatcagcatatttcgttccattagtcatgacgactttatcagccttcaactttagctgattaatgatattagcagtcaattcataccgtgttgatccgggtattcgctgcacatttgaagtttttttaatttgattttctacagcatcactcacgctgaacgaactcccgataattatgacttgcttcggaagatcataatccggcaatttatccttttcagtcagtaaaatgggatagccgtttgcagcggcatacggagcaatggctaaagcgtcttgaaaaacattacctgttacaacaattgctttatcgtaatttcccatttgttttgcaatgttttcagacagaacataacggtttttcccgctgattcttttcacagctccataagacttaagcttattttcaacgtcctttgaaatacttttagccccgccgatgaccagaatattatcgggattgaacttagcaatctgtttttctgttgtttttgtcaaagtgtccggctgtgtaaataacaccggcgcatccaatttttttgccagaggaattactggtaatgcatcgataaaaacatcacgattgacgagaataacggttttaggattcgtccattgggagtcagatgcaagagccgccgtctcatatcgggatgcccccgaaaagcggttggttacagacacatgatcaccggtaacctgataaaaaccggttggagataaagaaatgcttgattgatttcctatgtaatttgtcagcttaacagatatatttgaatctgccgcaaaggaaaccgccggtataagcaatataacaacagctagagtcagtcctattaaatgtttgcaagttttcaagattacagcgtccccctgttcattaatttgccggttcgatatccttcagcataagctgtcccttgctatttttttgatattttactgtcactttgtcgccattatccaaattcttaacatcgtcggctgattcttcagtgatatcaaaacttaccggttcatgatccacagtgacttctattgtatgagtatccgccagtcctacataagtgccctctttcgttaccagcttttcacccgcatcctcaccctgagatttttcattattaactccgcacccggcgagaagcagtataaagaacaaacatccaaaaatttttttcatttttttcacctcattatggattatcgacaatatattatctattttaaagaaaaattaagaaacattgaaacttttttcgataacattcgactatattaggatttattgtattctattataaaatattgcatttactgggagttcgatttccaatttaaaacagatggggtgtattgagatgagaagtaaacgaagaaaaaagactttgttactggtctttctgacaatcatcggcatttttattttagtttccggcggctttacatactatctatggcataaagcggcatcaaccgtcgccagtattcacgaagacattaacaaatcgaataaacgcagaactgaggtgaaaataaataaacacgaaccgttctctgtcttgatcatgggagtggacgaacgtaaaaatgataaaggaagagccgactcgctcatttaccttacagtcaatccaaagacaaaaacaacggaaatggtcagtattccgcgtgacacttatacaaaaattataggcaagggcacgatggataaaatcaatcattcatatgcatttggcggtacgcaaatggcagtagatactgtggagaatttcttgaacctgcctgtagattatttcattaaagtaaacatggaaagctttaaagatgtcgttgacactttaggaggcatcactgtcaacagtacattcgctttcaactatgacggttattccttcagcaaaggcaatatttcattaaacggtgatgaagccctcgcttactcacgaatgagaaaagaagatcctaaaggggatttcgggcgccaagacagacagcggcagattatagagggtattatcaataaaggggcaagtatctcttctgtcacgaaattcggagatatgtttaaagtagtagagaacaatgtaaaaacgaatttaacctttgatgatatgtgggatattcaatccggctataaagatgcccgcaagaaagtgattcagcatgagctgaagggtgacggcaccaaaatcaacggaatttactattataaagcagatgaaaacggtcttgcttccattactaaagaattgagaagcagcctcaacctttaaactaatgcagaaaaagcagcttcgcatactttatgcggagctgcttttttgttacacttcaaaagaatcaggatgctctgaacgcagtccgaattgatagagcagtccctcagcaatccttcttgacgccatgccatctccatagggattagatgcccgcgacattttttcatattcctgcttgtctgtcagcagctgttttgccatctgataaatcgtttcttcatcagtaccggctaatttcagagtgcccgcctccattccttcgggccgttcagtcgtatcgcgcaatacgagaaccggctttcctaaggaaggagcttcctcctgaacgcctcctgaatcagttaaaataaaatacgaccttgacgcaaaattgtggaaatcaatcacttcaagaggttcaattaaatggacgcgctccgaatcaccaaagtgcttatcagcagcttcacgtacagcaggattcaggtgtaccggataaacgacttgcacatcactgaattcatctgcgatccggcggatggctttaaacatatgttccatcggctgacctaaattttcccggcgatgcgccgtcagtaaaatcattctgtcattgccgattttctcaataatgttatgggaatattcagagtgaaccgttgtatgcaaagcatcaatcgctgtatttccggtaacaaaaatggagctttcttttttattctcattcaataaattttgcttcgctcgctgagtcggagcaaagtggatatcagcaatcgctccggtcatttggcggttcaattcttccggaaaaggtgaatatttgttgcccgtccgcaatccggcctccacgtgtccgactgcaatctggtgatagaaagctgcaaggcttccggcaaaggttgttgtcgtgtcaccatgaacaagaacaatatcaggtttgatttccttaaacaggccgtccagttttaccagggcgtttgaagtaatttcagccagcgtctgccgttctttcataatattcaaatcaaagtcaggcttaatttgaaatgcgtgaagaacttgatccagcatttgtctatgctgggcagtcacagtgacatatgattctatttcagggcgtttttttaattcgagcacaaggggcgccatttttatcgcttcaggccttgtaccgaataccgtcatgactttaagttttttcatatctctttctcctgtatcaagtttgtgatcatttttcattatcaacccattttacacgatatgatccgccggttaaatatcttgtattatttttcccctaaatgaaaaaggatatatcattaaggctttacggataaaacttgtttaataatggtttatcttatatcattaaaagtgttaaaaatgaaatatcgggtatacagaaaatatcagcaagcctgagtctgtatagatatcataacttatatttaagtgatgctaaggaaggtgctttaaagtgaaaaaagtacgcaaagccataattcccgctgcaggtttagggacacgctttctgccggcaacaaaagccatgccgaaagagatgcttccgattgtagacaaaccaacgattcaatacataattgaagaagcggttgaagcgggtattgaagacattattattgttacgggaaaaagcaagagagccattgaagaccattttgattactcaccagagctggaaagaaacctagaagaaaaagggaaagtcgaactcttagaaaaagtccgaaaagcctctaatcttgctgacattcattatatccggcaaaaggagccaaaaggtcttggacatgccgtttggtgcgcacgtaattttatcggtgacgagccattcgccgtccttctcggagatgatatcgttcaagctgaaaaaccagggcttcgccagctgatggatgaatatgaaaaaacactttcttctattataggggttcagcaagtgcctgaagaagaaacccatcgttacggaattattgatccgctgacaagtgaaggccgcagatatcaggtgaagaactttgttgagaagccggctcaagggactgctccgtccaatctggcaatactgggacgttatgtcttcactcctgaaatcttcatgtaccttgaagaacagcaaattggtgccggaggagaaattcagcttacagacgctattcaaaagctgaatgaaatccagcgggtttttgcttacgattttgagggcaaaagatatgatgttggtgaaaaactgggttttattaccactacattagaatttgcgatgcaggatcgtgaactgcgtgatcaccttatccctttcatggaagacctgttaagaaaagatgaattataagaaaaaaagctgttggatttattccaacagctttttattttataatgcaggttaaagtttgattatcgttattgataataaaagcgtatttatcatttgccgcaataaattgccgatcactgctgccctttataacatctttattattcagggatagatctgccggagtaatagctgatattcctctgaaaacaagctgctcggccttgccattattcactgcataactgacctcgccatttttaagatatagcgtctcccggccgttcactacttctttctgcagctctttcatttcttgctgaatatcattaacgcgctcaccgagatgtgacacaagttgatcagtatcaccctgctttacatacggagaaaaagcggatgctttcacatttgaacttttttcgttatagaccgctgcattttccgggatatagtacgttttattattgacctcaatctttgctgattgcctgtcttcagataccactttcacctgagcaccgaacggaataaggaagtccgccttttttttcagctctgtatctttataggcctgcgtctggtcttttaatacgaaaccttttttgttcaccaatatctggtctttccccttgttaacatcatcttgatatccgatcttaccgaaggaagcgatcgtacgaagcggggcgctgaaaaacatggttcctgccataaacacaagcagtattgataaaatagcaatttgaatagcattgactgctgatccggatttactatttttcttttgttccttcacaattgcctgctgctcaggcgattcttttttacgttcagcaacctgatctttcttatatttctctttgtcttttttggagagtttattaaaccaatcgataaatgctttgtactctttgacgacggtttcagtgtcgtcgaacattcttaattcaccatagtgcatccaagccacacggtcacacattttttcaatctgaccgatggaatgactcacaaagaaaatggtttttcctcgttctttaaattcctggatccggtcaacacacttctgataaaatgtctggtctcctacggagagggcttcatcaatgattaaaatatccggatctatatgcacggaaatagcaaaaccaaggcgggacttcataccgcttgaatagtttttcaccggctgattaataaaatcaccaatctcagcaaactcaactatgctttcatacatctcatcgatttctttattggtcagccccatcattaaacatttaagtcttatgttatcccggcccgtcaaagcattatttaaaccggctgcaatcgcaatcagcgacggctggccgttcatttcaatttcaccgcttgtcggcggtatcacttttgcaagcagattggacatcgtcgatttacccgatccgttaattcccacaaagccgattgtctccccttcatatacatcaaaggagacatttcgcacagcgaaaaaaccgttatctttagcagggaaaaacaaaccttttattttgtccgactgtttttcataaagatgatactgctttgaaacatttcgaaacgaaacctttagtttcatcgtacaatctccttacgtattaaagaaagtcaataaacttatctctgaatttcatgtgtaaaacagaaccgactgttaacaaaaataaggtgaacagccagaaatacagtgtatatttcacatcttgaaagaaccactgaccatctaataagctgttcctgaaaccgtcaattatataaaaaagcggattcagcttcaagacaggaaccaattccgggtgagctgcccccagctttgagttaatatcccaaaaaaccggcaggaggaaaaacaaaagtcttgtcactgcctgcagaagaaactgatagtctcggatcagcacgctgattgtcgaattaaacaagctgaacgaaaataagaaagccatcagacaaacaaaataataaatatattgaagccaatgaaggctcggatagattccgctggcgagcaatgcaatgatatagatcaccatcataattgcataactgaacaaattagaagcgatggcgacagacggcaaagaactgattggaaaattcattttagccaccattttaattcttttaaatacactatttgatccgtctaatattgtcggacttataaaaaaccacggtatcagacctgcaagcatccacagaataaaaggcacttctccggcacctgtagccatcggccccccttttctgatccccaatccaaaaacaaaccaataagcaagcatttgaataagaggatttaaaaactgccataaaacgcctaaataattcatttgatatttagactttgtttcgtaggctgctaaacgcatgattaaaggaaatgatgttacttgctcttttagtattttcactacagcattcattttaatcttccttaggttgatttgattttataaagcatcgctgataattgtaccagaaatcaaattttttttcactttcaagccgcatgcaaatgctgctaaaaggtttgtaaatcataatagaaaaaccccttgatacaaaggggtttttctattattcagattcaaacacaattttcacgactttctcagaagaatgtcctgactcaagataacagaatttgtcataaaaaggtttgaatgaaaccgggtgctgataatccggtgatgaaatatgtttgattgcctcgatcgtttcctctgtcgttttcactaacggaccaggagcatctttctcaaaatcgaaataaaaccctctgagtttatcccggtatgtttcaatatcgggaacaaaaaacagcatcgggcgttttagatttgcaaaatcgaaaaatacagaagagtaatcggtaattaacagatctgaaatcatatacaattcccgaatatcttcgtgtgcagaaaagtcgtaagcaaacccttcaaacggaccgaggtcaaaattttcggccacaagataatgcattctcagaataacgagatattcatccccgagctcttcccttaatttatgcaggtctaaatcaaggtcaaatttataacgccctttagcataaaactggtcatctctccatgtcggcgcataaagaataattttcttatcctcaggcaggtttaaccttctttttatcgctgtgattgtctcattattattgtcattatgaagaaaatcatttctcggatagcctgattcaatcatagttttatcgaattggaaggcgcgcgcaaatatctcagacgagtaggcattaggggaaattaaataatcccaattggatgcctctttaataaaattccttttatattttttcgtattagtacccggcatatgaacttcttccatatccattgcaagtctttttaaaggcgtgccgtgccatgtttgaagataggttgtatgttccggctttggaatccataaaggcagacggctgttgacgacccaatattctgcccgcgccatagcaaacagccacttgatagaaagcctgttaatgtattgaatgcccttctctttaaaaggcgctgcatactgtttatttacgctccaatacattttatattccggatgattgatttgcatgtattcataaatggctctcggattacagctgtattgtttgccgttaaagctttcaaaaataatggtcttgcttttaacaggcattttgctcgccattctgaaaacaactttataacctttcgtaatgagggaatttctgcgttttttcagttttttcattttggaaatgaaacgttttttcttcccttttatgaagtatctcatccttgttttcaggctgtagtcgttcacacggatacaaacagtctgctttttcttctttttatatacctcatacctgaccggtccgctgtctttattcacaacgcttatgaggcctttcagtttattttttctgtctccgagcacaagcggagtgctgctgagaacaataggttcagcttcgtcgttttcacaatgaaactccataaacatacggtagacaaatcgtttttccagagaataaggaatatcttttaatggaatttttatttggaaatcaaaaatttcaggggtgaatgcatcttcccgaagctgttcaatattctccgtttttttcgtcattttaatagggaaatgtttctctacgggatcttctcccccttttttaatgacaaattgcaggtttttaactgaaagctgattctccgaacttagatatcctgcataccctgaaattataatctcttctgccttcagctgaatctcatcaaacttcacaatttttgcttctctttttacctttaaagagaaattgcccttatcagttgtataaggtaaaattaacagctcagtcgtatgatcaaggtggtaggcacgctcaatcgcttcagcttccacggttaaacgcacctgcttcggctgttcttcttccgctgccggttcccccagtaccacataaaaatcataagtctgtcccatttctaaaggttcaggaaacgagtgaatattaattgatgcactgtattgagccgggctctctttctctaaaataacaacatcctcggctccggaacgccgttcttttaattttaaataacatttcacttcctcagctaacggttcttcgctttcaagtgaaatagagagtgccaggtctcccacattattttttaagcttttcaaaatacatttgctcacggtattttcatccatacttattttctgctcctctgaattaaagctcttcacttaaccgatttcacttaatcgatgtgatcctttttgtttaatttaatagagaaattccctttcacagtcgtataaggttcgaaagtatatccgttattcataaaccgatctttttcgccgaaattgacttcacggctggatacccttcttagaatacggatatggtcagctgttatatattgaatgtaaaagtcaagaaccgaagtatgatttgcgtcaattttttctttttggatgtccttttcaaaatctatataaaatggctgagccggttgatcagcggatacggatatgatttcagatttgtttttccgatcaatcccaaccattcggactttttcaaatgcatcattctggtcagacactgaaacgctgatcgctaatccgttggcatttttttcaaaagatgtgatcgggtgttctttagaaccgactttttcagcaagccgttccttttcttttctcacttcaaccattttgaaaagagcatatgaccaatttttaatatagtttggtttagagtatttctccgccattttaaaggctagacgtgaaaattgtttgtgagtgctgtcatctctcattaaagagataatggcctcagccagcttttctatattatattgttcaattacatagccgtttactccatcttctaccaagcttctggcaccgtaatcgtaatcgtaagttacgaccgggcatccattgctcaatgcttccatattggacagaccgaaaccttcaaagtgagaagttgaaattgtcagccacgctttttgaaactcgtaatcagggttgttcgtgtagcctttcagcaatacattattcttgaggttttgagcttttatttcctttttgattttctctgtttctcctccagaaccgaatatttccagtttcgcatccgggatttcatttacaacaagtttgaacgctttaacggcatgcgtcaggtttttcattggtacaatccgagagataataaccgctttatttcgttcgctcggaactttcaaaacctcttcatcaagcggtttattaatcgtatgcggcgtaaaaaagaatgtctctttttcccctgaaatcaaactgaaatctgcaatctgctcctcagtgataaaaaatacggcatcaaggttatttatttgaccgaaaagttctttatagcgtcctttgatctggaacttattatcaccataatgtttattgtgaataatcgcggcataataagatgacggcgcttttttcactctgaagacatgtttatcctgtagtctgctgtcgaccagaaatagtttaggccgatcgttttctttttggagaatatcaatccaatgcctgcgcaactcaaattcatccttaaatgttaaagggtcttcttctgagtaccaagtaaaatgtgtgaatttgactgcttcactttggtcatcccacatgaagtgcttttccagataaacgacattttcgttgttgataaactcctgaaggaagatttgattcgtctttgtatcaaaatgagagacaatgacgggttttccttctttattgtattcttcccttttgattacttgtttttcatcattcaggtaatctacgtaacgcacgtcatcactgcctgaataataggaaagattataatcgtttgatgattttccgaacatttttgagatagttttgcttactttccccttactgacatgtttttttatttgattcagctcaatttttctccgaataaatccgcttgccttttgttcttttacttaaaaagtcatcgtacatgttgataacttgtgtatattgagggtccgttttctttctttcaaagagttcgtttttttttctccgaaattccaaatcaaatttaaaagtaagaaaggcggtattcttttgactctcttctccgaatagtttagaacgcaataatagtgatttggtcagacctccgtaatcatccgggaggcctcctgagataaaataatacatcatatcgggaagctcattattatcgttaataggctgattggacaaattttttctccctttcaccatatggaatttagtaaaacactgcaaaataatactattccctcagattattataacaaacctatttaagcatcaaaaagtactccttatcagcaaataagaagtactttgaacagttcatacattcaataattccgtattacaccccggcaatttcttttttaatctgtgtggtggaaatgccttcggttctagggaggtagatgacttcgcattgatctttaaggaaatcgaatttgccttcccaatcgtctcccattacgaacacgtcgatgttgtgatccgctacgtcacttactttttgatcccagctgttttccggaatgacttcgtcgacataacggatcgtttccagaatcagctttctgtgttcatagctgtggtaggcctttttttgtttttgcaggttgaactcgtctgttgagatggcaacaacaaggtaatctccaagctgctttgcgcgctcaagcagtttaatatgaccccaatgcagtaaatcaaacgttccgtaagtaatgaccttcttcatgaaacaaaagctcctttctatcatcatacgtataacaagcaactgctctgaaatgctgcgcagctgtatccttaatcactaaagtgccaatttcgtactcatggaacctcattatatcacatagccctgaaaaggttaagccaatgtaaaacgaagttacattccacttattaacaaatgttattacaataggagtttagcagggtttttgcgcgtatgattaaagaaattgttatcttatttatatttttgtaaaactattgttaagtttatctgaaggtattatgttaaaataaagcttagcctaattcacgaaaaagtgaaagaaaatcccgtacaaaaaggaggacggcagatgcagactgaaatggtgcacaacctttcttatgttaatggaaatttacaggagtttatttcatatttagacacttattatatcgcacagaagcaaggagccgtcattgcgacggtcaatcctgagatcggatacgctgcggcgaaagacaaaggttatcatcaagtcatttcttccgcggatttcgtcctgccggatggtatcggcgtcgtgttaatgtcacgtttgacgcagcacccgctgaaatcaagaattgcgggattcgatgtgtttcttgcgctgctcggcctcgcaaaccggcagtctaaaaaaatatttttatacggagctaagcaagacgtgcttgacgccgttttgaaccggatcagcaaagagtatccgaatattgaggttgtcggagccagcaacggttatgaagcggataaacgcttcgtcgctaaacagatttcccgggcgaaacccgatctcgtgtttgtcgccttaggatatccccatcaggaacaatttatttatgaatacaaacatcttttccctcaggctgtatcgatcggtttgggcggaagctttgatgtgttcagcggaacggtgaaacgcgcccctgaatggatgatcaaaacgaatctggaatggctgtacagactggtgacgaatccgtggagatggaaaaggatgctgaacattccgaagtatgcttttaccgttttgagaaataataaatcaaataaaagcctgtattccaagcaggcagaagatcaaacgaaacagctttaaacaaataaaacagcaaaagagattggtaatctatgaacttgcgatctttattcgccgctttttattctatatatctgtctgttctcggcgttttgttcaagcctgtaaagcccaagaaccacctgaccctgctggtatcttttgaagagaatgcacaggctctcatccgttcttacaaagcgcacgctgaatcgctttcttatgaaatgacggttttgtatacgagacatgccgtcagtctgaaaaaagagctggaaggtatcggctctttttatctgaacgaaaaacatccgctgcatcttttgaaggcggttttgatcctttttaagagcaaagcggtgataacggataactatttcctcatgacaagcgtcttaaaccgccggccgcaaacgacatgcattcaggtgtggcatgcgaacggctctttgaaaaagttcggccttgaggatgtgacgaatcaaaaccgtccggcatcagatatcagccggtttaaaaaagtgtaccgctcgtttgactttgtcaccgtcggttcagacgcgatggctgacgtttttaaaaagtcgttcggcatacgggacggccagctgttaaaaacgggtgtccccctgactgacgtctattatgaagaacacaagccggaactgaagcacaaatggccgaaaaaaatcatcctgtacgcaccgacattcagggattatgatatgcaatcctttcggctgccattcaccgaagaacagctcacaaacgcgttaaacggagagtatatgctgcttgtaaagcttcatcctgccgttttgcatcatatttcggcttcgtttgaaagcgaattgatcaagaacgtgtctgacatgcgtcttcatgatctcttgaaagccgctgatattttaattacggattactcttccgtgccttttgaattcgcgctcttaaataaaccgattttctttttcacgtatgatctggaagaatatgatcaaaagcgcggtttaatcgacaattatacttccgtcatccccggaaaggcttgtcatgacagcgaagctcttctggaggaaatgacgaaaaagccatttcatgcagaagaaatgaagcggttcgcggacaaatggaatatgtattcagatgggaattcgagcagcaaactgctccaatttgcagaagaacaaataacatacaaaaacacctgttcacacaattgaacgggtgttttatatatttatattgcctccgtagtgcttaaaaataatcgtacaaacaaaaagacatctgtccaatttaatattgaaaaaagctcggaagtatgactccgagctctttaacacgtttatttatagacaggaatatcatagtaaagctgatagttatctaacagactataaagactgtacattctgtttacctgcttatacgcccaaccaatatcagatgcatattggtggcttacagaaggctcccatctcattttatacaaggtatcttggttgtatacggcattgtgtatataactctgtccgataaatttggcccctccagtaatcgctgcttcaggactgaaccatccttggttatatgcatattgggcacccttgttcacagcgtctccgtcatatgcacctatgccatacatgttatatacctttttcccattataggtcacaccgtttgccagctctgaggtaccgtttccggtctctaataaagcgtgagaaatcaggtagagctcattaatactgttagattcagctgccttaataaaagcttcaccttttccttcaagaattcctttcccttttaaaatcttcgtattgacttctgatgctgtcagtcctgcatatttcgataacttcaaaaactgaaaataacttttatctgacacagaaaagtttgcggggtttacatagtaggaaacttcttcctcgcttgctttccgccaacccattttaattttggcccagttattctctacactaatgatattaaccttataaccttttgtcactgttcctataatattattgctctttacctctggagtggacctgacattaagaaaatctgcggttacggtagaatttgcactattaatataagatagagatacgtaggcacttgaatccgtctgcgggttcgcttttaactgcttcgcgaccatttcactcatcgtaatattataatttgtttccattatttgaggaccgcttttcacctcaacacttgaaactgcccacccataaagctgcttcactttgcttgcagccttatcagcattgctttttcctgtaaattgttcagtaatcactatactgtatattggattgtttttagtagtgtagcttgctgataagttctttgccttaaagaaactcagtcctttgtttaaagccgacgatgtgctgatttgatctgtaactaatttatattgcgtgtatgtgcttttgccattttgtttggcgttgcctttcgcattatttgttttaaaaaaagttaacacacgatctatatctttttgatttaataagtcactaacagtgacttgatattgcgtataagcggatttaccggttttttcacttactgccgttaatttttttgtcttgaagaaagatttgacttgattaatcttagctgtgtccagcaaggcttctgtcttaattttataagttattccttttggttgttttatagatttggcagttgcattaataccgattttctttaaagagtttaaaccttttgttacttttgttttgtcagcagtctgttgtgataacagttgatattgattagcagctgtttttcctgaatttgattttgatgattttaatttttttctgctaagaaaatttactgctttatctgcctgtgcgtttgttacagcatttgttatcacttgataagttgtttgtgttgacgttttctttacagctgtataagtcatatgccatcttttcttcttaaaaaaggcttgaagactttttagtttttccgggctgacatctttcattttcacaaaataattatttgtagccccaaccttttggtaggtccctttaattccagtgttattttttatttggctgatggcattcttaaccatactcagtccattaaaataacccgtttctatattatacgatgtgatagtttttttattattgatggttttgtaactgcttttgacgcctgtgctttgttcaagctgtttgataagacttttcgcctcatctgctttattaatcaaagaattcgttgtaacaatgtagtaagactggcctttatcagtcatgtttaacgtggcattcagcccagaatctttttgaaaactgcttttcacttgggatgctgttttctctccttgaatttttccggattgaatttgaatgatctccggttcctgttcaagtttttgataattagcattgactccagtctgcttctttaactcttgaatagctgcctttacactggcctcacttgtcagctcagatgtaacaatgcttatataaggctgcttcacaccattcggtttaacagtaccggttaatcctgtttcctttttcattttatcaagcaagttattagcctgctgttcacctgaaatagtgccggaaactgcagtataatagggctgcttactgcccgtcggacttgatgttcctttaatgcctgtctgcttcgtaaaatcgcttagtacgcttttagcattcgtttcgcttgtcagacctgaagcagatatttgatagttcttagacgttccgctcttttgatagtctgctttccatccggtatcttttttcaattttgcaactgcctgagaagcctcactttcagaagcaaacttttgtgttgtttctaactgataaatggaattgtcaatataagctgcctttactgagtctgttatcgtgaaaaattcaagagtaaccgctgacaataacattgcggcagccaaactttttttcattacctctcctccttctctatatttatctatcacactactacttttatcggaaagtgcttcaatttttaaagtgaaatatatataaaaaaacttaatcccagagctgggattaagtttggttttatatatgagaaacgatgatcgtgcaatctccgtttatcgtaaagtcaggcatctgatccggcagtatgaaatgcgcgcctttttcaagcttggcggacttgccttcacagatgatggagccgcttccttctgtgacgctgcacagcataaacggagcgtcctgggtcatttccgccgtcccgctgatatcccatttgtatacagaaaaatattctccctgcacaaaggttttgatggtgacgccttttctcgtttcagttgattcatctaaaaatccgtccacatgaggaacggtggcggcgttgacggcatcgcggatatgcagctcacgcgcctggccgttttgatctgtacgcccgtaatcatatatccggtaggcggcctctgaattctgctgtgtttcaagcacgagcgcccccgcacaaatggaatggatggtaccgctcggcacataataaaaatcgccgggtttgatcttcacacggcgcagcaggccttcccagtcaccgctgttaatcatggtgacaagttccgctttcgaacgggccgtgtgaccgtatatgatttccgcattttctttacagtcgataatgtaccagcactcagacttccccgtttcgcccagtccatgctcctcggcgtcataatcgtcaggatggactttaacggacagatgttgtttgacgtccagtattttcgtcagcagcggaaaccggtccccttccgttccgccgaataattctctatgctgatcccacagttccatcaaggttttcccttgatacggaccgcttttgaccgtgctcattccgtgcggatgggctgatatcgcccagcattcgccggttgtttctgaaggtatgtcatatccgaatcgttcgcgtaataacgtgccgccccataatttttctttacatacaggctgtaaaaaaatcggctcttgcgtcatgttcgttcccctccccttaaaaagcggctcatatcccattccccctgtgtctttttttaaacacggagggagccgcggttaaaaacaatatgtataaaatggctgacctgctcattataccattcggatggggcggaatgctcagtcatttcctattccagaataaaatgccttgtttgtcgcaaattaaaataactgatggaaaggggggaacattgtgacgatacatgcggagctcggcaaaaaccttgaagtgctgaaaaaacggttcggccaaagcgatgacatgatgttttattcgtttacgtatggaaacggcaaatgtgacgcctgtcttatctatatagacggactgaccgacaatcaattgcttgcagaatatattatttcgcccgttcaggcggccgcccggcatcaagaggaaccggctgaaacaccgccgtcatccatctctttcggctatcgtcatacccggctttcttcacttaaggacgcggaggcagacattttctccggcaaatcggttttgctggcggagggatgggaggaagccctttcgtttgagacggaaacatttaaaatgcgtgatattgaagaaccgtcttcagaagtgcttgaacgggggccgaggataggttttgtcgaaaagcttcggacgaacacggcgcttttgcgcgagcagtccggtgatcccaacctccagatcaaagagatcacactcggcgaacggacaaaaaagcggatcgccgttgcctacattcgggatattgcccctgatgatgttgtaaaagaagtgatgaaaagactggattcgatcaccattgatgacattccggaatcaggagcgatcgagcagcttattgaagataacacgtattccattttcccgaccgtcttgacgaccgaacggcccgaccgggttatgggcgctcttttggaaggaagggtttccattcttgtagacggaacgccttttacccttttggtgccggctaccgttgatgaatttatccactcccctgacgattataatcagcggtgggttccggttacctttctcaggctgcttcggtatacatgcattttaatcacgatttatttacccggcctttacatatcgctcgttacgtttcacacggggctcttaccgacgagaatggcggttacgattgccgggagcagattgaatgtcccgttccctccttttgttgaagcgttcatcatgatttttacgatcgagatgatcagagaagccggactcaggctgccgaagccgatcggacagacgatcggcctgatcgggggcgtggtgatcggacaggccgccgttcaggcgaatattgtcagcgcgatgatggtcattgtcgtatccgttacggcgttggcttcttttacggcgccctcctatgcgttcaattttccgctgaggctcatccgtattttttcgatgattttgtcggcgatattaggtttatacggactgatcatgtgctatctgcttgtcgtcggccatctgatgcgtctgaaaagcttcggtcaggactatcttattccgatcatggcgcagcctggccaagacttaaaagatacgatcgtcagactgccgacgcctcttttgaaaaaacggccgaccagaaaagagacgaaagataaaatcaagcaaaggtgatccccatgaaaaaaccggaagacaagctgtcgtttatgcagacacttctcatggtaagcggaacaatgatcggagcgggcgtgttaacactgccgcgctccgccgcaacagcggacagtccgagcggatggatcattattcttgtgcagagtgtcgtgtttatcggcatcgtcctgctctttatgccgtttttgcagaaaaacagcggggaaaccatttatgagctgaatcaaagcatcatgggccgcgccatcggttctcttctgaatttattcatcagctgttattttgtcgtcaccgtctgttttcaagcccgttttctcggtgaagtcatcaattactttttactgaaaaatacgccgatgggtgtcgtcatattcatctttctggcggtcggcatttaccatgtgaccggcggggtctatcccatttcaaagctttatgcctatctgtttccgattgcgatcgtcatcctgattacgctgctcatattcagtttgagactttttaagctggatttcgtccgcccggtcatggaaggaggctacaaaagcttttttgagctgtttccgcaaacccttctgtatttttcgggacttgaggtgattctttatctggtgccgtttatgaaaaacccgaagcaggcgaaaaaggcggctgtcttcggcatcgcaggcgcgagcattttttacagctttacgctgcttgtcgtcatcggctgtatgtcggtcgctgaagccaaaacggtgacgtatccgaccatatccctgattcatgctttggaaatccggggcattttcatagagcggtttgatatctttcttttaattacgtggacatgccagcagttcacctgtatgctcggttcttttaaaggggcgcatctcggattaaacaccattttcaaactgaaaaataaaaacaatgcctggctgctgggaggcttattggcagtgacattcggcctttcaatgtaccccgatgatatcaacagtgtgtttgcattcgcgaatattctcggatatgcgttttttgccgtcattatgattccttttctcatctggtttgtcagctggatgaaaaaaatagccgggaggaaacagacgtcatgacacttttcatcaaatgggcggcggcgcttttcatactgatgacgctttcaggatgctgggacgcgaaggaagtcgaaaagctgtctttcgcccgggggctggcgatagacgagacgagtgaccgccgatataaattaacctatcaaaacctgctgccccaaagcgaaaacagccaggcttccggccggcccgtgtttgtcaatgtgacgacgcggggggataccattcttgaagccgtcagtgaagtcgctttaaaagatccgcctgtttacagcgatcacttaaaagtgctgatattcagcgacaaattgctggccgaccaaaatatactgcagatgatgaatcattttatccgcgatgatgaattaaggcggagcagctatctcttcgcggcaagaggaaaagcgtccgatattctgacggagccgacgccgaatcagcagcagcccatggccgcggaaaagctgatcgaccttacgaacaacggcggctacaacgggaagattttacaaccgctccgaatcgggagagcttcgatttactgccataataaactcagttttctcattcaggccgtcagcaatcaaaaaggaaaaacggtgtatgacggagcggccattatcaaaaacgcaaaacaaaacagattggcgggctttctgtcatcatacgaaatacagagcctgaattggctgatggggacgatacggggcggcgtgctgcccgctttggataaaggggggcacccgattaccttcgagatcaaaaaatcaacatccgtcatcactcccaggctgaaaaacgggaagctgtcatttcatgtagcggtaaaaacaaaaggacttttgtcagaggatcaatatgccggagaagattcattcgatcagcactatttaaacgggctggaaaagattttcgaaaaaaaactgaaaagcgatgtgaaagaagtcatcgataagctgcagaatcaatatgaaacggaccctgtattcttttctgacagagtccgcattcaatatcccgactattggaagaaagtaaagcatcattgggatgagaccttctccgaagcggcttttgactatgatgtttccattcagattaccaacttcggaacgatgggacggtagccttcagcctgttttttcgacacggaggagaatttgataaatccggctttgttcgggcagctgtgtcaccggaaattgcatcgattgcgccattcgtgtgatttcctgtaaaaacagctgcacccgctcatccacgtgaacatacgtataggactgctttttcacagtaaatgtctcttccggaaagagcgtgcgcaccgtctgcggcgtaaaaaaccgcaagtgggtgcggtcgagaatgccggcgtctctgtatgtccagttaccgagcagaagcgggaacagcgcttcggcgtgggaaatattcggaatgctgcaaacgattgatccggcaggcgacaaataggatgagtacgtttcaatgacgcgccacgggtcttttaagtgctcaaggatgtccgcgaaaatgatgcaatcaaaaaagccttccggataaggcagcttcacttcttcgacatcttcctgcagaaccgctttataatgcccttttgccgcttgcgccgccagcgggtgcagctctattccgtacagttcgcaaggctgtctgttttgaagttccagccccgtagctcccgcgccgcagccgacatcaagtatccgtttcgcctcccggggaacgagctccgcaatttccggtctcggatgagtaaaatacgtaaaatcagtgccccatttttccgtaaaacgctggcggttctccgaatataactgattgatattgatatcctgattagccgtaaacgtcgcgtgaccgtggtgatgcacaaaggcatcgagggcgatgtgcaggctgtagcctttttgcagggcgcgcagacataggtcatcatcttcaaaagaaccgtatccgaattgttcatcgaacgggccgatgtcttcaatgacgcttcttttcactagaagacagaaaccgacaaggcgcagcacccgctttgtatgatgcttttcccgttcgcaatacgcctccgcgaatgactccagctcatcaagcgattgatacgcgtcatggatcatttgcgcgccgctgacatagttgctgacgggcccgaccataccggttttttcagattgatacagcaccctcagcatggaggtgagccaatttttcgtgaccatcgtatcgttgttcagaaacagcagattttctccccctgccgcttcgattccctggttgcaccccttggcgaacccgaggtttttttcatttaggatgactttgacgtcaggcagatttgatatgtattctctcgttccgtctgaggaaccgttgtcaactataatcagttcaatcttatctttgtcggtgtatcgttcaatgctggccagacattttttcgtcagctcaagttcattatatgtaaggataataatactcgttttcaccggcatccccgcctttatcgtgactttatacaacgtatgacatatccccgtcatttatgtgaccgggcgcccgctcggcatccgttttgagggggccggtgaataaccgcccccctaaaactgaatattacggatgaactgtccgccgatttgattctgatcccgagcctccgttacggcttttcagatcctgctcaatttcttcaaggcttttccccttcgtctcggtcactttaaaccggacgaacaggaatgccagtatcccgatcgcggcataaatgagaaataaatagctgatgccgactgcttccattaacatcggataggttaatgagacaatcaatgttccggcatgcagcatcaaagtggagacacccgtcccgataccccggacatgcagcgggaataattcaggaagcatgacccacacagcaggcccccagctgaccgcaaacacaatgataaacaggcctaaacaaatcaccgttgtccatgatgcggctgctgaatgttcaaagaagagattgaccgcggccaatacgagcaggctgatgaccatgcccgcatttccggccagcagcagcggcttccggccgatcttatcaatgactttaatagccgcaagcgtcatgatgacattgacggcgccgattccgaccgttcccaatatagacgcggaattgccgaacccgacactggtaaatgttttcggggcgtaataaataattgtatttgtcccgatgaattgctgcaaaaaggcaagtccgaggccggcaatcagcgcgggtctcacccacggctcaaacaattctttcaagccgccttcgttttccttttccgcttctttcatctgatcaatctcatcatcaatattcttcgttccccgcaatgatgaaaggatttcacttgctttctcttctttgccgatcgtaaacagccagcgcgggctttccggcataaataagattccgatcagcagaatgactgacggcacaaccgcaagtccaagcatccagcgccaagcgcctgcatcggcaaatatatagttcacgatataagaaacgaggattccgaccgtaatcatcagctgattcagcgaagaaagcgccccccgtttatgcttcggagccagctccgataaatagagcggaacgatcgttgtagatgttccgacagccagtccgagaatgatccggaaaagaaccatcacctctgtattcggggcaaaagcgactcctaaaccgcctatacaaaacagcagcgccgctcccatgatggccttccgcctgccgaaccggtcggtcagtttgccggcgaatcccgacccgagaatcgcccccgccaataacgaactgacaacgaggccttctgtaaaggcgttcagtcccagttcttttttcataaataaaatagctccggaaatgactccggtatcatatccgtataacgcgccgccgagtgcgccgaaaaaatagagccatttattcgagtgtatgcttttcatgttatgtagactcccttcatccaacgctgtaacgcgcggaattgttctactgcttcttttgcctgtttccgtccgtttcaaaccttccgcaccgttaatatccattattttactaattattttttacaaagcgacgaaacatttcccgcttcctgccgtccaatataatgtgaacctgatgcaaaaataacagtagatgttgtcgaaatagagagaaagatttggaattttctcatttacagagttgctccaagtcaacaattatggtacgcttcacaaagaatagaaacgagaggtaatgatatggaagaacgatctcaacgcagaaaaaagaaaagacgcctcagaaaatgggtgaaatttgtactggtattcgccgctttcttattggtgatcgccggttccgtcggcacctacgcatttgtgaaattgaataatgcgaccaaagaagcgcacgtcagccttgaccgcggcgaccagtccgtaaaacggatcaaagaatttgacccgaagaaggattctttcaccgtattgcttttaggaatagacgcccgtgacagtaagggtgaatcagtagatgacgcaagaagtgacgccaacgtgctcgtcaccttcaaccggaaaaagaaaacagcgacgatgctcagcattccgcgggattcctatgtcaacatcccgggacacggctatgacaaattcgcgcacgcacatgcttacggcggttataatttaacttataaaacagtagaaaacatgcttgatattccggtagattatgtggttgagagcaacttcgacgcgttccgcgatgtcgtcaatgagttgaacggcgttacggtaaatgtgaaaagccagaaaattgccgatcgtattaaggtcgatacaaaaggaaaagtcgtgctgaagccgggcgtccagacgcttgacggtgagcaggcactggcttatgtaagaacacgcaaagccgacaccgatctgatgcgcggacaaagacagatggaagtgctgagcgccattattaaaaaatctaaatcgttaagctcgatcccatcttatgacgatatcgtcgacagcttagggaaaaacttaaaaatgaacttatctcttaatgacgccatcggtctgttcccgtttatcacatcgctgaaatcggtggattctttgcagctgacaggttcagacagctatatttacactcctcagtacggcaaaaatatttattacttcaagctgaatgaggaaaaccttcaagaagtgaaaacgaaattaaaaaatgatttaaacgcgtaagatgtcacggcggggttagcaaatcccgccgtttttctgttgaaaaaaaggacatgaaggtatagccttttaactgacggctttctgctgatttcgcacaaagctgaacatactacatgaagcagctttatttttaaggagggcatccatacatatgaaattgatagccattgacttagacggcacattactgaactcggacagtgtgatttctccggaaaacagagcggctttacaaagagcggatgaagcgggcattctcgtggccatctgcacgggcagagccacatttgatgtaaaagcgctcttaaaggatttggatattccgatcattgcggcaaacggcgggacagtccatgacaaaggataccgcctcgtcagccggctcttaatggatcagcaggccgggaaggatatcgccgcttatttaacggacaacgacatttactttgaggtctatacagatgatcatctgctgtccccgtttgacggcgagtccaaactgcaggcagaactggacattctgaaaagcgccaatcccaaggaagatattcggacattatgggagggcgcaaagacgcagttcaaacaattcggcattaaacccgtgcaggatatacaggcgatttttaacggagacgaacatgtttacaagcttctttgtttctcttttgatatggaaaaactgagaaacgccaaagaagaaattacacatcatccgaaattatcccagacatcttccgggaaacacattatcgaaatcctccctgccggttccggaaagggacgtgctctgacggagcttgcctcactgtacggaattgaaaaacaggatatttacgccatcggcgacagcccgaatgatttctccatgtttgaagcggcgggaaaccgcatcgcaatgggcaatgcgattgatgaactgaaggaaaaaagcacgtatattacaaaaagcaacgatgaaaacggcgtcgcatatttcatcaaccggcttctcgacaacgagcaataaaaggcaaaagccaggtctttcacggcctggcttttcacgtttcccaaaaaaggaattcccaaaaatgaaaataaattgtaagataaagaaaaaaggagtttcatgatgtcgaatgcaatcgctattataggatgtttagcttttctctgcgcagtcggatacggaatattccatctcatatgcaaagcggcaaaaaaagacaaacatttttcaaaaaagctgttttggccccttctcatcggcggatttatcctgcttctgaccggcgcctccctcgcagagccggacgcctcggccgtgaaggcagaggagaaatacagcacccttgataccgcttatcaaaaattgacgaaggaacaccaggcgcttgagaaaaaatatgaaaacatcagtgccgcggccgaaaaggagaaatccgaagccgaagccggcaatgaagaaaaactcagcaaactcagccaagagataagcgagctgaaaaaaacaaacaaatcactcaaacaagacaatgagaaattaaaaaattcacaaaagaagctcgaaaagaccgctgaaacgcttcagtcagaaaataaatctttaaagcggcagaaagcagaaacaaaaacatccgaaaacgcggaaacggcgcaaaacaacgccccttcctccggcggacatgccgagacgaaagcagccggcacctcacagggatgcgacattaaaggcagccggaacggcatttatcacacgccgggaagtacatactacgaccggacgacagatcccgcggaaatgttctgttccgtagaggatgcggtagcggccggatacagagcgccgaaacggtaaaagaaaaagacgtcagagacactctctgacgtctttttttacgggagccggatgctgcccgcatatttgtccttccaataagcgcttgtgttcatatttgttatggtaacgcctgcggacacggtgacatgaatcacttgtccgttcccgatataaatggccggattcaggctttccgctttaaagaagaccagatcgccgggcttcagatcttgtttatcgaccggaacgcccgcctgcatctgcttgtccgcataacgcggcaggctgattcctttcactttttgatagatgtattgaacaaatcccgccgtatcaaagccggtttccggtgaaacgccgcctttcagataagaaattccgatatgatcggccgctgtggacacaacgggattttctttagaaatggctaaattgctgaatcggcgcacccccgtaaaatgttttttccaataatcttccgacaagtaagaaatggtgacttttgcggagcggcttgcttggatgaaccttccctctcccgcataaatgcccgcatgggaaattccttttttatacgtgtcgctgaaataaatcacgtccccgggctttatgccgctcagtttgattttctcaccgaccagccactgctgttccgctgatctcggcaggtaaatgtgaagcttgttttcaaaaacatattggaccagccccgaacagtcgaatccctcctcgggcgtgcttccgccgaatacatacggaatgtcgaggtaacgggctgcctcctgaacgatcgggtcatcagccagttccggatcttttgtaatccgctttgcgccaagatataaattcatccaataactgcttttttgaaaccgtgtgacggttacgccttctgacggagaactgtgtatcatctctccgtttccgatataaagaccgtcatggacgggtgcattttgtgttgaatccgactttttgaaaaacacaagatctcccggtaaaaggtcattttctttgacggcggttccaatcttccattgatcacttaccgttctcggcagatggatgttctgcctgctgaaaagataatgcatcaatccggacggatcaaaaccgtcctcaggctcttcgcctccgtaaacatatttatttccgacaagtttttgcgcgtctgaaaccatcaggacagaaacttgagaatccgcttcagcaatttccgttctcgttactgcgggtgccacaagacaaatcataaggccggcaaggatgtacttcctccagcttgtgagcatgttttctattcactctcctcatttttagtagtttttacatcggtaacttttaacaaatgtttaggagagcacacaaaaaaagaatgcccgatatgggcattctttactggattcggaacaaacaatatgccggcaagcggaatcatgcgcttattttgcgctcgctgtgtcctcttgctgaatcttttgcatttccgtgtcaattttttgtttttcctgatctgtgagctgatcattgtatttaaacgctgacataaacataaataccataatgatcgcggcaaacggccatcccgctttaatgattttcatttgtttttcactccgctttcttttttaagatatcgctgtgatccacatcaaacgttaattttccatccttgacgctccaatcgaaattcgattctttcgtcagttcacgtacgatcgttttatgattgatgctgccttttttaaccggtgcaggcgttgcttcatgaatattcatcggcgtgacttcaaagcgtcccgtgccgtttttctgcagatgatattgaacaagcgccgtgtctctcgttcttgtccacccctggtcgaatacgaagttgcccaggctgtagaaaataacagtgccgtggtacatttcgatcggttctagcacgtgcggatggtgtccgacgataatatccgctccggcatctgacattgctcttgccaattggcgctgtctgtcattcggatcattatcgtattcctgtccccagtgtgtttgaacaatgacaagatcggctttctttttagctttagaaatcatcggaataaacagctctggatcggccggaagcacacccggcgcatttcgtttagctgcaaagccttttccggaaacatcagtgaaacccagtgttgcgattttgattccgtttacatcttgataagaaatgttctgctcggcttccttcagcgtgaggcccgcgccgacaagttcaagattttgctttgaaaactcttcaaccgtatcccgcattccttgagggccgtaatccatcgcatggttgttggctgccgtgagaacggtgaaattcatgtccttcaatacttttacggcatctttgtttgactgaaggtggatatttttttctgcttctttgtagttctttttatatgtaaccgggttttcaaagttccccgacacatagtcggatgcttcgaagaatggctttgcgtaacggaagacactctccgtgcctttatgctttgtcactttctcgacattccggcccatcataatatctccgacgaatgaggctgatacaaggtcatcggcatttcttttcacactcggcgtttccgccttccctgtcaggatgcagacgaacatcaggcaaaagacgatcggcagcgcgataaaaacgtgaagattggtcttctttttctgctgtttggtcagcttcagcagtttttcttgaaagcttaattgttttttcatcgtttgacacaccttacattagattaagtagtaagcaaacataatggcaaaagttgcgccgcttaagaacagcgtgctggcaaatgtaatcgttaatccctgtttctgaatggtattggcgatcagacccggtacgatgataccgattccgcggaattctgatatctcaaacggtacgatcgggtaaaggaaatcaagggcgatttttaagcagattcccgttatcagcatagctgcgaattttctgcgtccgtacaaaatcataaatctggataaaccgtatttgacgatcacgtatgtaagaagactcactaacaatacgagtaaaataaagaccggctggttaaaaacgagccctaaataacccggcacgactaaaccggcaggtacgatacctgttttttccgcgaaaattaaactgattaacacgcctaaaataagtgagatgtataaatctgatccaaacatttatccttttcctcctagctaacgagctgtttcaccttatattcttgaattttttcaattaatggttccgctgaaccgtggatattgccgacgccatatatgacacggttttgcattcttgttttcagcacgtccatgatttcgtctgttgatttatattccaggtcgtgcaatgtatcggcaggaatcttgccttcttcataagctctgacgatcggttctgtcgtctcgccgatgagtatgagttccttcgttttaatgtacggaagcacgtcgtttgcgaactgaatcgttctgtccacacggtcggcgcggcagttcatgataacgatcggttcatctgtcgggtagccgatttcctttacacgtttccatatatttaaagtagaagatgcatcatttgcggcaaagccgtttacgaaatgaccgggctccttcgtgctgagcagcggcaggattctcatggcgccaggatcaggcggcgcattcagcattcctttaaacgccgtttcttcatctatcccaagagcctgggcaacgccgagcgcaagggaagcgttatcaggaaagaccatatattcaaattttcgaaggtattcatctgtaattttagagttatccgcaataatgacctcggtattccgctctgcggctttttctttaaagaagtctgtgtattcactgtctgtaatgacaaggtgaccgttgtacggtatcgtcgcggtaaatgcttcagcgatttcatcaagcgtcggccccatgacgtccatatggtcttcaagcacattcacgatgacgccgatgttggcttgaaggagttcttcctgaaagataatctgataatccgggtttaccgccatacattcactgacaatggcattggcgccccgttctacggtttccttcattacttctttttgctcgccgatattcggaccctgcggtttccgtttgatcggtttctcctcaggtgtatcccaatagatcatccttgcatctgttcccgtcgtttttccgactgttttgtagcccgcctccatcagtattccggtcgtcagcctcgttacggttgactttccgcggataccattaatattgacgcgtactggcagggcatcgatattcttctgatgccgccttttttcaatgattccgatgattagtacggcagcacaggctataatgagtaaccacattgatttttgacatctccttctgtattgataaattcattcatcagtatatagcttcactatgaattctcaatcggcattatgtaacataatcttcccgctttcactgagccaaacttctctattagtgacgctattcttcctattatcgaattgctttttttgggaataggcaggacttcaaccttacttcaatttttcaaaagaaaaatgaatgcgtttacattttcacacagaaattcatttggaccaatggaactattcgcgttccggaagaaaaagatgtaatgataatccatcttttccagcccgtttgtatcagcgtttttcgcactgcgcatacgtttcgggactctctgtccgctgtgtgcagactacctgttttgttaaggataaggtcttaaagtcattcatttttcccccgtatcctgctttcagtcccattccaaaataactagcggaatgactggtacatgacagaaaaagacgggtccggagtgtttacaagaaatacacattttatatgcggaaagcctttctccttttaaaccatttacaggacgtttatcactcttttgaaataattttaataaatctttatattcgttcaagaaatattcatccataattgtgaagttcttggtaaaacatcgaggaactcctctattttataaaatgcataaaaaaggaatacccgctgaaaactacagataaccaggaaaggaggcggtctgatgtctgcggataaacaaaacaaacggattcccggcgattttgaatcggctgtacgggaaatgcaggagctgatgtgtgtttgcggtgattttaaaatacgaaggatcaaactgcaggaccgtcataccgctttcttttatattgaacaaatgatagaagaacagaagctgaatgagtttctgttaagcgacaccctgcagaacggcccgcttgaggaaacgatgaatgccgtcagcagtgcggaaacggatgaaaccagaaaactcattgacgggattttggccggccaggttgtttttctcagcgatgcatcgaggaaagcgaagctgttttccgtcgggcagaatccgctgcgttccattatggaacccgaatctgaaagtatcgtccgcggcgcccatgacgggtttgtggaaagtttggaaacgaacattcatcagctgcggtttcacatacaggaccgccatctctccgttcattatatggatatcggggaaagagccaaatcaaaggttgcggttatctttgttgagaatatcgccaatccggagattgtcgaggaagtgaagcggcgcctgtcatacttgcgtatagacagcgtgcttgcgcccgggattatcgaggaatcaatagaagataattcgttttccatttttccgcagatcattcatacggaacggccggataaagcaaaagcatgcgtgatggaaggctgtgtactgatcatgatggacgggagtccgtcggctttgattgcgccgatcacattcttttccttttttcaatctccggatgactacagcacgaggtggatttctgccagttttttaagagtgctgagatttttcgcctttatgatcgcgattacgctgcccgctttttatatcgcgctgattgcgtttcattttgaagtcattcccaacgatctgattatcaccatgaaaaattcgattgttgatattccctttcccccgctgatagaagccatgattatggaaattacgattgaactgatccgcgaagccggtatcaggctgccgagaccgatcagtcagacgatcggcattgtcggcggtctcgtgatcggtgacgcagtcgttcaggcgggactcatttctaatatgatgattatcgtcgtagccgttacggctgtttcttcttttgtgcttccttcatatgaaatgagcacgtccatccgaacgctcagatttccgcttatgtttctggcatcctcgttcggttttatcggcatcgcactcggcttcgggcttattctgatgaacctgtgcaagcttgaatcactcggcgttccttatttatcatctctgacgccgtttcatttcagtgacttgaaggatgcatttatccggctgccggcttggtttattaaaagaaggcctttttatttgagaccgcaagactcaaagcagatgaaacatgttcgggggtggagaaaagatgaagcctaaaaaaatcagccggcttcaaggcgtgtttttcattaatcagacgcagatcagcatcggcattttggcgctgccccatttactgatgatgaaatcgggaagcagcggatggatttccattctgcttaccggattgctcgtccagcttacattcagcctgtatatgatattatttcaccggtttccgaagctgaacctgtacgaaatgctggaggaggtgttcggaacacttgccggcaaaggggtgcaggtgctgtatattttatatttcgcgtttctctgcacgctcattctttctgtatttacacggatattggatatctgggtgctccctcagactccgaattgggtgatcagcttaatgctgatcctcggttctgtctatatcgcccaggctccgctgaatgcgatcgccaggttcagctttattttaacgccgtttttgctgctgatctctctgccgcttttatacacgctgggaaaagccgatatcacatacattatgccgatttttcacggaaccgcaaaagacatgctgaccggggtgcagcaaacacttgtcagcattaccggctttcaggcggcgctcgtgatcgggcccctaatcaactgcaccgtcagccagcgctacaaaatactgacgatttcaaacatcttgattatcctttattacctgtatatcacccttacttgctttgtcacaatcagccccgaagaaataaaaatgatcccggagcctgtgctgtacctgttaaaaaccgtttcattcagaattatcgaacggacggatctgctctttttgacgttttggttcgtgaccgtcttttcaacgctggccaacgtgttttacttggcaagcaccggcattgccaagctgttcaatcaaaaagatcacagccggtttgtttatccgctggccctgctcgtcttccttctgtctatttgggccacaagcacagataaaacgatacagcagctggatcagtttttccgcatttccgatattgtgtttgtgtatttgtttccgttgtttatggtattgattgtccttgtacgcaaaaagggtgtccgccatgcgcattaaaaaagcggttcttatcagtctcatgtgcgcaagcctgacacttgcgggctgctgggatcaaaatttgctgaaagatatttctctcgtgctgaccgcaagccttgatgttgatcatgacggtaaaaataaaatcggcatcacctatcggaaggttcagtcctcccaggcggaacaggaaacgggcggctcattcattacgacggtgctcagcgcttccgggcacaccatccgtgaagcgcggtttcaattggataagcttgtcgatcagcgcattgacacgtccaagcaaagagtcttattaatcggtgagaaaatggcggaaaaaccgctttttccttatctcgatgtcttttacagagatccgaaaagcccgcttctcgctcatccggcggttgtaaaagacggcgaggcgattgaagtgctgaagctgatcgtccggcagaaattgatcgtcagcaagtatttaacgaatttattaacaagcgctaatgcggaatcaaatatcagcatggaaaatttgcaatccatccgttcaagcatgctgacggctgataaggatttcgcccttccttatttatcgattaacggacagacgataaaggtagagggttctgccctgttcagcggccagcgaaaagtgactgaggtgctcggtcaggattcgaccctcctgacccttttaagcgggcaatttaataaatcggctaatattaatctgaagctgtgggacaaatacaaaatggatattgaaaattatctttctctcggcatcacggatgccacgcgaaagattgtatttatagatacagatccgcagcatataaaagtgaaaatccgtttaaaactgaatgcacgcgtcttggaatatccaaaggacaagctgaattcttatacggcaatcgaccaaataaacaaacaagcctcagcaaatttgaacagccaggccagatcggtgatcagccatattcaggagcacaattcggatatcctcggcatcggccggaaatatcaaacccattattatgagcggggcaagcggctcaattggcgtggggtctatccttccatcgagataatccctgatattaaagtgaatatctcacaaatcggcatcgtgaactaaaagagaccccggtctctttttttgttgccaaccgaaatgattcgtgttactctttttatgtaaacggttacatagttgaaggaggagtgtttgttggcaacgattaaagatgtcgcaggcgctgccggcgtctctgttgccacggtttcacgtgtcctcaatgacaacggctacgtgcatgaagatacacgaacgaaggtcatgcttgccatggagaagctgaattattatccgaatgaagttgcccgctctctttataaaagagaatccagactggtcgggctcttgcttccggatattacgaatccctttttccctcagcttgcccgcggcgctgaagacgagttgcagcgggaaggataccggctgatcatcggcaacagcgatgaagaattggaaaaagaactcgactacctgcaaacatttaaacaaaatcaagttgccggtattttggcggccacccattaccccgaccttcccgaatacagcggcagcctttacccggtcgtatttctggaccggacaaaagaaggcgccccatccgtattcagtgacgggcgggcaggcggaaaacgggcggctgaggaaatgcttcgcggcaaaagcacaagcatcacgcttgtcaaaggcccagcccaccttccgaccgctcaggaacgttttaacggtgcacttaacgtgctgcaaaaagcgaacgcacagttcaatgtcatctccgccgcttcattttccatcaaggatgccgccattttagcagaagaattgtttgcagcataccctgaaaccgacggagtcattgccagcaacgacattgcggcggctgccgtcctccatgaggcgctgcggctcggcaaaaaagttccggaggagattcagatcatcggatacgacgatattccgcagagcaggcttttgtttccgccgctttcaaccatccgccagcctgcatatgagatgggaaaacaagcggcaaacctgctgctgcaattgataaagaaagagccgccgaaagagacggccattcaaatgcccgtgacttacataagaagacaaacgacaagaaaggatgatcaccatgagtgaaatttgtgttatcggaagctgttctatggatctggtcgtcacatctgaacggcgtccgaaagccggagaaaccgtactgggcacagactttcaaaccgtgcccggaggaaaaggcgcaaatcaggccgtagccgcttcccgcctgggcgcaaacgtatatatggtaggaaaagcaggcaatgacagctacggaaaagcgattattgaaaacctgaaggcaaacggtgtcaatacggactatatggaaacggttacacataaaaaaagcggaacggctcatattgtgctcgcagaaggagacaacagcatcgtcgtcgtaaaaggcgcaaacgatgacatctcccccgattatgccaaaagtgcgctggcaaaacttcccggcattgatatcgtgctgatccagcaggagattcctgaagaaaccgttgaagcagtgtgcagctactgccgcgcgcagcaaattccggttattctgaatcccgcgccggcccggccgctgaaacaatcgacgattgaggatgccgcatatcttacgccgaacgaacatgaagcatccattttatttcctgaccggacgaaagaagaagcgctcgccggctatcccggcaaactgttcattaccgaaggaaaacaaggcgtgcgctactcagacggcaccgcggaacggcttgttcccgccttccctgccgaagcggtcgatacgacgggagccggcgatacctttaatgcggcacttgccgtcgcactcgcggaaggacgggacattgagcaagcgctcctgtttgccaaccgcgccgcctccctgtccgtgcagcacttcggcgcccaaggcggcatgccggccagaaaagaagttgaggagctgctgtcatgaaaaaacacggaatgttaaacagccacattgccaaagtattagctgatctcgggcatacagacctcatcgcaatcgccgatgcgggtctccccgtccctgacggcgtccctaaaattgatttgtccttaacggcgggcgttcccgcctttcgggacgtgaccagcctggtagccggggagatggcagtcgaaaaggtgatcgccgcttccgagatcaaagacgcaaatcctgagaatgcaagtttcatagaaagccatttctcagcgcagacgatcgagtacatgtcccatgaggaattcaaacggctcacacagaaagcaaaagccgtcatccgaacgggtgaaatgacaccatacgccaactgcattctgcaggcgggtgtgattttctagaaagaagggatccagcatgcacatcggcatgacagacattcataaagcattcggcaaaaaccaagtgctctccggcgtctcatttgagcttctgccgggagaaatccacgctttaatgggagaaaacggagcgggcaaatcgacgttaatgaatctgctcaccgggctctaccggctcgacaagggaaacattacgataaacggaacaaacatgaacttctccaatccaaaggaagccgaaaagcacggaatcgcctttatccatcaggaactgaatatatggccggacatgacggtgcttgaaaacctttttatcggcaaagagctgacgacggcattcggcgttttggaaacgaagaaaatgaaagcgctagcaaaatcacagcttgaaaaactgggagtctctcttcctcttgaccgggaagccggacaatgttccgtcggacagcagcagatgattgagattgccaaagcgctgatgacaaacgccgaagtcattattatggacgaaccgaccgcggcgctgaccgaacgggaaatcagcaaactgtttgacgtgatgacggcgttaaagcgggacggcgtatccatcgtctatatttcgcaccgaatggaagagatattttcgatttgcgaccggatcaccattatgcgggacggcctcactgtcgatacggcgcatatgaaagaaactaattttgatgaagtggtcaaaaaaatggtcgggcgggagctgaccgatcggtatccgactcgcacgccgtcactcggcgataaggtgctcgaagtgaaaaacgcctcaaaaaaaggaagcttttcacagatcagtttccatgtgagcgccggagaaatcctcggcgtttccggcttaatgggtgccggacggacagaaatcatgagggcgctgttcggaattgacaggctcgattccggagagatctggatttccggccgaaaaaccggcattcggggtccgtacgatgccatccgcaagggactcggcctgattacggagaaccgcaaagatgaagggctgctgctggatacgtccattcgtgaaaatatctcattgccgaacctgcccagcttctctccgaaaggcatcattgaccgaaaacgcgaggcggagttcgttgagctgctcatcaagcgtctgaccattaagaccgcatctccggaaaccgccgcccggcatttatcaggaggaaatcaacaaaaagtcgtcatcgccaaatggattggaatcggcccgaaagttctcatccttgatgaaccgacaagaggcgtcgacgtaggcgcgaaaagggaaatctattcattaatgaatgaactgaccgatcgcggagtcgccatcatcatggtgtcttccgagctgccggaaattctcggcatgagtgacagaatcatcgtcgtccacgaagggcgcatcagcggagaaatcaatgcggccggcgcaacacaagaacacatcatgacacttgccacgggagggcagcagtatgaaaactgaaccaataacatcaactgaacaaaagcgattttccattcacaccttcacgcaaaaactcggtccgtttctcggcttactgattcttgtgctgatcgtttccgttttaaacccgagttttcttgaacccctcaatattctcaaccttcttcggcaggttgcgattaacgctctgattgcattcggaatgacgtttgtcattttaacgggaggcattgatctctctgtcggagccatcctcgccttatcgagcgcattagtcgcaggtatgatggtctcaggcatcgacccgatcttagccgtcatcatcggctgcgtaatcggcgccgtactcggcatgataaacggattattaatcacaaaaggaaaaatggcgccgttcatcgccactttggcgacaatgaccgtctttcgcggactgaccctcgtctatacggacggaaatccgattacggggctcggttcaaattacgcatttcaattattcgggcgcggttattttctcggcattcccgtacctgccattacgatgctgattgcatttgcggccctgtgggttcttctgcacaaaacaccgttcggccgccggacatacgccatcggcggcaatgagaaagcggcgctgatatcgggaatcaaagtgccccgcatcaagatcatgatctattctctgacaggtttattatcggcgctggcgggagcgattctgacatcacgcttaaattccgcacagccgacggccggggaatcatacgagctggacgccatcgcagcggtcgttctcggcggaacgagcctgtccggcggtcgagggcgcatcatcggtacgctgatcggggttttgattatcggtacgctgaacaacggcttgaaccttctcggcgtatcatctttttatcagctcgtcgtcaaaggaatcgtcattttaatcgcggtgctgctggaccgcaaaaaatcggcatagtaggaggaccattatgaagaaagccatcatcacgatcgcggcattatcactgtttttgctgtccgcctgttcacttgaaccgccacaatgggcaaaaccgtcaaacacaaaacataaaaaagaattcactatcgggctctccgtctccacattgaacaatccgttcttcgtttcattaaaagaaggcgttgtaaaggaagccaaaaaacggggcatgaaggtcattattgtcgatgcccaaaatgattcatctaaacagtcaaatgacgtagaagatttgatccagcagggagtcgatgcgctgctgatcaatccgaccgattcctcagcgatttcaacagccgtcgaatcggcaaattccctcggcattcccgtcattgcgcttgatcgttcagccgaacacggcaaagtcgaaacgcttgtcgcctctgacaatgtcaaaggaggagaaatggcggctgactacctcgccgaccagctcggaaaaggcgccaaagtggcggaattgcaaggggtgccgggcgcatccgcgacacgggaacgcggaacgggctttcatcatattgccgacaaaaagctggatgtcgtaacaaagcaagcggcggattttgaccgtacaaaaggattgaccgtcatggaaaacctgctgcagggacatccggatattaaagccgtgttcgcccataatgatgaaatggcactcggcgcgctcgaagcgattaacagctcgggcaaacacattttggtcgtcggtttcgacggaaataaagatgcgatttcttccattaaaaacggaaagctgacagccacggtcgcccagcagccggagctgatcggaaaactggcggccgaagcggcggagcaggtgctcaaaggagaaaaagtcaaaaaaaccatttccgctccattgaaacttcaaacacaaaaataaccggccgatgtttagacttccggtaaaacgtgaaaggatgaagtaaaaggagagatacagatgaagaaaacagccaaagcggcatccattctgacccttgcagcgggaataacagcggcttcagctgccggaataacgcctcttccggagacacacgcgcaagaagcggtcaaaattgacgatctgtacagctacccgcttgactcttatctcgtttccgcggaagcattgaacgtcagaacaaaagcatcagcagccagtccgagagctgatacccttcatttaggcgacagcttaaagatcgtttcattccagaacgctgactgggcaaaagtacattataaaaacggaaaaacaggatttgtatctactcattatattgttaaagaagcaacaaccgtaaaaacgacggcaaaaacaaaagtatatacagacaaacaagcggtcaaagcttcccttgctaaaaacacgagcgtttctttcctcggatggaaaaagacatccggcggcggcattgatttcggctgggcgcttgtcgattacgggggcgcaacgggatatatcagcacaaaagatctgcaaaaactgacataatatcaaaacggatttcgcaaattcagcgcgaaatccgttttttctttcttgagcagtcagaaacgtctaaggttcgaaatatttctcaggaaatattgtcggatgaagatgaatgcatacaactctaaaatggcttctttatgtaatccgccaggcgtttggcattgtcacggatagccgcagcatcggcgctgcttaccccgtacatcgcaaaagccggcaaataggtcatacccgtaaaattagccattgcctgaaacggccttaagagctcgctcagtgaaaaatggttagacccgcctgcctgatatgcatcctctccggcacctacggaaacagccagcagcaattctttgccgtgcagcgcctttcctttggagccgtaagcccatccatacgccagcacatgatccatccatgtttttaaaagcggaggcgcactgtaccagtacagcgggaattgaaatacgatccggtcatactgttcacacagctgccgttccttttccgcatctatttttccgtccggatattctttataaagctcacggaccgtgatatcatcatgattttttaattcttctgtccacgccttattgaccgctgagttgtccatgtcaggatgaaccgctaataccaatactttcacagctaccacacctttcccttttgactgtattttacctaatctttgccggttcagccaaataaaaagaaagcccccgagaaaaatggggctttcttttttaatttattccgggcttccttcggttgtttcgatgtccttcgcaaaattcggattatctaaatttgcgttgaaaaagtccgccgtattcggaagcttgaggttcatattcattttttgagaaatggtcactttacaatctttaatgacatagtcaaacacgtgtccgccggaattgcgtccttcatcaatgaagtgcaggtgatatccggaaacagcgatgccgtttgcgtatcccggcgtccagaagccggcgattgtaccttgaatgtcgtcaaagttgaacacaggctgtgttttcaccgcttcgatcatcggaacgtacggtttctcctggcgttctaccgttcttgtctgcacctttttaaatacgccgtctaaacggatcgcataaaataagtttttactaggcagaaggctggcgatttcctgctcgaattcttcacgggtcatttcgccgtcgatcgtatgcgtcatatccggcgtgaaaaatgtgaatgagcagaatggtgacaggtctccgcctttaacaggcgtagccgttccgtcgccgcgcagacggtaaaattctccgtcaaatccgattaattcgccgtccaatttgttgaacgtgccgattccgaaatcaccgaacttcggaatgtcagccatatcaaaatctccgtcatatactccgtccagcagagatgtcattgtggatacttgatagatctgatcctcaggtgagcctttttctccgcggctcatcatatggatgtcgcttgcgtttttcatattcccttcactccttttaaattgggctgttttagaaaacaggtcatggtgcgcagagtgctagagagcttttgctttcattttttctttgaattgcttcggaagcatgtcgcttgataaatgaacattgtcactgtaatcgacaggaatgtcaatgatgacagggccttctgtgttcaagcctttttgcagcacgtctgccagctgttccggtgactcaacgcgcaagccggtggcgccgaagctttctgcatattttacgatgtcaatgtttccgaaatctacgcatgatgtacggttatattttttcatttgctggaatgcgaccatatcatatgtgctgtcattccatacaaggtgaacgatcggcgcttttaagcggactgccgtttccaattccattgcagagaacaggaatcctccgtctcctgaaacggatacgactttttcacccggattcaccagtgtggcggcaatcgcccaaggaagcgctacgcccaatgtctgcatgccgttgctgatcaacagtttcagcggctcataagcgcggaagtagcgggacatccagatcgcgtgagaaccgatatcgcaagtgacggttacgtcgtcatcaattgcattgcgcagttcttggacgatttgcagaggatgcactctgtcggatttatggtcgcttggcgccttctcgctgtctgtgagcatctgttttaattcgctcagcacttcttgttcacggctgcccatatcaaatgtcacagcgtcgtgttcaatttgtttaaccgtagcggcgatatcgcctaataattctaattccggctgataggcatgatcgatatcggcatggatttcgtcaagatggataatagcacggtcgccgtttacgttccagaacttcggatcgtattcaatcggatcataaccgatcgttaatacgacatccgcctgttcaagcagaagatcgcccggctggttgcggaacagtccgatccggccgaaatattggtcttccagctctctggacaatgtgccggccccttggtacgtttctacgaaaggcagttttgttttggcaagcagtctgcggatttgttttaccgcttccggtcttccgcctttcatgccgactaacagaacgggaagtttcgccgtctggattttcgcaatagccgcgctgaccgcttcttccggtgcagggccttgtttcggcgccggcacgctgcgtacgtttttcacatttgtgatttcattcacaacatcctgcggaaagctcacaaaagccgcgcctgcctgacctgctgacgctgccctgaaggcgtttgttaccgcttctggtatattccctgtttcctgtacttctacactgtattttgtaatcggctgaaatagcgccgcattgtccaatgattggtgtgtccgttttaaccggtctgcgcgaattacgttacccgccagcgccactaccggatcaccttctgtattagccgttaacaagccggtcgccaagttggatgcccccgggcctgaagtaacgagacaaacgcctggttttccagtcagtcttccgacagccgcagccataaatgcagcgttctgttcgtgacggcataaaaccagttcaggtcctttatcttttaacgcatcaaatactgcatcaatttttgcacccggaatgccaaaaacatgtgtgacaccttgctccactaagcaatcaacaacaagctccgccccccgatttttttcagaggtttttagttcatttgttgcttttgccaacaccctcactccttattatgcatattaaatataaaattttaagtaatttgtgatattattcactatacactctttggaaattgacctccaatatcaattcgccgtatgattaatatgtttcacgaataattaacaaagagaaaggaatggataaggatggagcttcgccatcttcaatactttattgccgttgccgaagaacttcatttcggcaaagctgcgcttcggttaaatatgacacagccgcctctcagccagcagatcaaacagcttgagaaggaagtcggcgtgaccttattaaagcgcacgaaacgggttgtagagctttcagctgccggagaaagttttttaaaacacagcagaaacgcgatcgaagaaatagacaaagcgattgaaatggcgcagagaacggcgcggggagagctcggccgccttgtcgtcggttttgtcggctcggccacatatgaatttctgccgccgatcattcgggaattccgcgaaaaattcccctccgtcaagcttgatctgcgtgaaatttcttctttcagacagcaggaagaacttctgaaggggaacattgatatcggcatccttcatccgcctttacagcattccgcgttacatatggaaaaggtgcagagcagtccgtgcattctggctttgccgaagcagcacccgcttaccgctaaacagacaatcgacattcaggatttaaaaaatgaaccgattatcacactgtcgaaagaaacatggccgactttatacctggagtttgtaaactactgcgagcaggcgggcttcaaaccgaaaatcgttcaggaagcgacggagtatcaaatggtgatcggattggttagtgccggcatcggtatgaccttcgtgccttcttctgctaaaaagctgtttaatctcgaagtcgcctatcgcggcattaatcaggtgcagctcacggccgaatgggtcattgcctaccgcaaggataatcaaaatccgattctgaaacattttctggatattatgaataaacgccaggctttattgcaggcggataaggaaaatgcataaaaagagggccgccgaaagcagcctcttttttttgtgcttttatggatttttactaaattggtagaaacgctcagtacaccttacgacctgtacccgtatacatacagtacaactgatcaggagggataaaaataacggggcggcaatgacccatctaaaaggaggcagaacacattacacatattaccgtcattttgaccctgatttctttctttgtgaccattatttttatattttggagacccgggggattaaatgaagccgttccggcgtcgctgggcgccattctcgttttgttatgcggaaccgtttcctttcatgatttgggggatatagggtcaaaagtcaccggagcctcaatcaccattatctccacaatgattatggcgatcgcgctggaaagcttcggtttttttaactgggcggcggccaaactgcttcaccgcgccaagggatcgggcatccggcttttttggctgaccaacctgctctgtttttcaatgacgctctttctgaataatgacggcagcgtcttaatcaccactcctattttactattggtcttacaatatctcggacttaaaagacatcagaaaacaccgtatttaataagcggcgtattaattgcgacggcggcaagcaccccgatcggcgtcagtaatatcgtcaatttaatttctctcaaaatgataggcatggacctttatttgtacaccaatatgatgtttatccccggcacgctgggactggtgtttatggcctttctgctgtttgccgttttttaccgccgtttgccgaaacagctccccgatattccggttcattttgattcgctggaacacaaacgatatcatccgcttcagcctccgccagacccgacccaaaacagccgtacgaacatcatgttttgtgttttggcatttgtattgttcgtccggatcagtctgtttgcagcttcttacaacggcatatccgtttcgctcgtggctgtcatcagttcagtcatcctgcttggctggagatggttttatttaaaaatcggaccggcagatttattaaggaaagcgccttggcatatctttatttttgccttcacgatgtacattatcatctacggactgcataatatcggactgacggcgctgcttgttcagtctattgagccttatgtctcacaaagcattgcccacgctgcatctattatgggcattgctacatccgtcctctctaatttgttcaataaccatcccgccttaatgatcagcactttaacattaactgaaatgtccatcgacccattaaccgtaaaaatcatttatctggctaatattatcggcagtgatatcggatcattgcttctgccgatcgggacattagccacgctgatctggatgcatatcatcagacagcacggcgaaaaagtttcttggtcagaatatatcaaaaccaccattatcgttgtccctctcactgtcgtgtttaccattaccgttttatatgtttggatcagttggatttacctttagctcccatgaaaaaaaactgcctgctgtataagagaggcagttttatcatttatggcaggtgcatggtttttaaatgattcaatttccaaaaaacagtatcgccgtctgcattggtcagttcaagaatattatctgagacatcctgcaacagccccactttattcggtatatctcctaaatccagaataatcagcttcccgatatatctttttaattgctcctcaaaattccggacaaggggcacattagcgggaacaaccggcagctctgaactgtttaatgtatacggcgtctgctcatcggaatagggtgtcagccatttcaaatgatgcatcgagatgaaaagagtcttataaaccggagagaagaaaacaaaataatcatttaaaacacttgtcacatacccatgaatggaacggtctcccgtaacaaatatttctgtaaatctgccttttatatgctggagggtattccggtaagaaaaggaatgttcctgtttttcgggatgcggacttttttttctagcgtacggttctttattctcttcgtccgggagcgtcaatgtcatccgctgaagatgcagaagcggaatataaagaaacgtccggccgtcatgaatcacaatgatatcctgaccgatatccaaaagagttcctgaaaatgtcgtattccccgatatctcaatatcgacttgtttatccagaaatctgcttaatccagccatttcattcccccctctcccgcgtttacggacaatctttccaatcatttacggccgcgtttccaccgataatctattgtccttaatacagtggcgtagctataagagacctctttctcccgttttgaggatcgaacggatcttgatgatcttttcgactttttagaggaagtacgctgctcttcgcgtgattcttcctcatgcggcttttcttcttcggcgctctctttctcacctttattctcgtcgtctttattctcctcttttttagctgctccttttgccccttcgctgatgctcttgatatgaaaaggatagatccgcagcacttctttatctttcacaagagtgtagtggccgtcggaattatccacaagtataccttcaacggcttcaggacctccgcggttgatggatacccatttgtggatcaggcgtttaaatatgccgtgaaaatcatcagccatttcaaattccgggcgctcctcctcttggccgtcctcttcttgttccgcgctgatgcttttgacatggtcggcgttaaaatatacaattccgtcatcttctgtttccagcacgagaaaatcatcccctgtttcgtgaagctttcctcttttcgattccggacctccctgattcaattgcaccgtgcgattggtcatccggctgatcaggtcttgaaaatcatcagctttttcacattctgccgcttcggactgcgatacggtttcactcgtattttccgtcacacttttcacgtgtttccattgataataaacgattttattatcaacctgaagagcgatataatccgattgaatgtctgctaatctccctgtcttggactccgggcctccccggtagacagtaattacctttccttccattgcatgcaaaaagttgtcatcagaccgatgccgcttcgtattgcgtttcatctattgtcctcctagtcatttttctcataatgtaaaaagcataatgcatatatacgtatcacgattattttcgggaactgattcaccagcctatttgtaaaaaatctttcttcatttccaaatcagatattccaccgctctaactcactgctgatgaaggctgaccgctccttaatgtattcgcaaatcacttcaggctcccggtcaaagcaatcaatctcttctttcttatatggatccttcgcgacatgcggcctgatctgctcatacagtgacatgaccttcggcttcatatattcaatggtaaaccgggtctgaagcgtctcttccaaaagccgtttgtacgctttgcggaaatacggttcatccagaagccttgcagtcaaggtattaaacccttgtattctgacataatcggcctccatccgatcaccgtgaatgtctcttccccacgtcgcatcgtaatcccacggaatgacttcaaaaagtcccgtttcatgattccggtacaaagcgtaattatgaacaaatccatcgtagtttgaggtaaacacgatgcccgcaagccacctcaaatacttatcggcgtccaagtgtttgacgatctcccccttgaactctgacttcggcacggtattaattttatagatcatatcctgcaagtataaatcgtcttctttcgttcccgttttcttttcataaccaagttcgagcgatgttttcgtatcccgctccagatcactgacgagggagaaattggcgtcgtcatcaaccgcgtaaaaaacagcgccgtccgccaaattccgtttcgccagaaaatattcatccactgactccagctcaagatacaccccctcatgtctgccattgatttgcagggttacgaaattcgcctttggtgacagcgtcccaagctccgcgaagaaatcgagagacagcttattccgcatcatcgacggatctttgtattcagcgtttaaatgtatctctttcgccctgcgaaatgttttcggcgaataaaaagcgatgtgatacgattttttcttaaaatctcttatatgcgagccgcggtacgccagatcaatgtcaagccgtttttgattcactctcagcaccgcgggcaccggatcatcatcccaaatgtcttttttcagatccattaagtctttcgggtgaataaacagctggtatagaggcaatgttgattggtctttcatcagtaaacctccctgtattaatttaggctgtgctttttatataaaactcagcgaatcacacatacacttttttcattcatgcgtactatgtggtagtaaggatcgcatccttaaaacatatatcatgaggaggtttcaaaatgggccactattcccattctgatatcgaagaagcagtaaaatccgcaagcaccgagggattggaagattatttgtaccaagaaccaaaaagcagtaagaagagaaaatctcgcagccataaaaaatcccgttctcacaaaaaatctcgcagtcataaaaagtctcgttctcataaaaaatctcgcagccataaaaaatcgtgccgctctcacaaaaaatctcgcagccataaaaaatcgtgccgctctcacaaaagatctcgcagccataaaaaatcccggtctcacaaaaaatctcgcagccataaaaaatcatgccggtctcacaaaaaatctcgcagccataaaaagtcccgttctcacaaaaaatctcgcagccataaaaaatcatgccggtctcacaaaaaatctcgcagccgtaaaaaatcatgccggtctcacaaaaaatctcgcagtcacaaaaagtcatgccgccgcaagaaaaaacgcacgcagaaaaaaacttatcgccctcataaaaaagacccttgcaaaaaagacgattactgcagcaaaacagagtactggaaagacgggaacatctgggttgtaaagaaaaactacaagtaacaccattcgtaaataggctgccggctaaacggaagccttttttcctcaatcagatatatgccacgtgataagatatgcagccggttttcttttgttgtgtttccgaattttctttctgtataatcaggtcatacgataaagaaaggcggccgaaatcatgcatatcttacgagcagacgaactgaacgcaaaagacacttacaaattgctttcgggcacagtcattccccggccgatcgcatttgtcacgacgcggtcatccatcaacggcgccgtaaacgcggcgcccttcagtttctataacgttgtctccgcagaaccgccgcttctggccatctcagtcagccgcgcggacggtcggcagaaagacaccgcgagaaacgcactcgctcatcgggaattcgtggtgcacgtcagtgatgagtccattattgaagacattaacaaaacggcggcaaggcttgatcctgatgtcagtgaacttggcatgacagacctttctgtgacagacagcgcttgcatcagcgttcccggtataaaagaagcaaaagtcaggtttgaatgtatactcgaacgccatcttccgttccaaaatgacagcggagaaacgacgacagacctcatcatcggcagagtcgtttgttttcatttgaatgaccaagtatatgacgccgataaaggctacatacggacagatgagctgaagcctgcggcaaggctcgcggggaatgaatacgccagactcgggaagacatatacgcttgtccgcccgacctgaagcaggaaccattataatagaagaaactagtcaaaaagacccctttcgaaaggggtctttttgagtcttttaccatgtaactcagcctaatgtcttatagaatgccgaaacttacaaggccctcacccgtatgaaacgagtgacacatttttaggaggcagacgatggatttcactcagttactgattttttcagccgtatttattttgctcagccttatgtttcaagtatttgccgtcaaagttctcaatttgccaaagcctgttaaaaagcagaagccgataaacggcacacatcgattaatcgaaatcacactgcttattacgggcatcgcagcggtgaattttttcaatgaaatgtacgtatttgcgggagttgttttcatgctattttgctgcagcggcttaatggaatggcggcaccggcgggaggaaaagcaatatgtgtacgattcgttttacgcaggtctttctgccgcgcttggcgtgcttatttttttcatcagttagcgcagctctatactcctgcggccgctccgtcgccgcgcgggtcggccccgccttggagaaagccttcttcatcaatgacgatcgctgccgcatggcccataagcccgtcaaaatcaccaacggtctcgacgcggtggccgctctgccttagggcttctctcgtttcagggctgattctgctttcaaccctcagcccttcatactcctctccccatgtccgtccccagacccagcgcggctcattgatcgcctgctgggggtccattttgtaatcaatgatgcgcgtaatcatcgctgtctgagtttgcggctggccttctcctccctgggttccgtacaggatgtgcggccttccttctttacaggccatcgccggcatgagggtgtggaacgtccgcttgccgggttcaagtgtattgatatgggattcgtccagcgaaaaaaatgacccgcggttttgcagcagaatgcccgtctcccccgctgtaacggcagatccgaactcaaaatagaggctctgaataaaggaaacggcatttccttccgcatcggcgacggcggcataagcagtgtcgcttccgaccggccggcttaccgccggcgcagccacgttaccgatttcttccgcaagctgctttgcataccgtttatcaagcagccgatccagcggaatatgagaaaatgccggatcagtcagcacttcattccggtgctgaaaactcttcttcagcgcctcgatcagcagatgataatagtcaaaggaaccgtgttcgatctgagaaaaatcatagttttccaatatattgagcgtcattaagcctgtaaagccctgtgaattcggcggagcctgatagattttgcacccgcggtaatcggaggataccgggttcgtccactcgccgcggtgggctttaaagtcatcaagtgtcagacggctgccgttgttttgcagaaaggatgtgatgcgttgagcgaggtctccttcataaaaagcgcttcttcctttctcggcaagctgctccaagctggccgccagatccttttggacaaaccgttcaccgggcatgggcgcttttttgtttctcgtaaaaatggccgaggtgtaaggcatcgaggctaaaagagcgagattgcgttctgtgtgggcgcattggtcggcggacaccggaaatccgtttgccgcataatcaagagctggcttcagcacctcagcgagcgaaagacgcccgtacgccgaaagcacggcatcccagctgtccgccattcccggaacggtaatggcgctttctgtcccgcgcagagggatcgcttctctgccccgatacaagtctctcgtcacatgcttccctgaacggccgctcccgttataagctttgattcgtcccgtttctttatggtaagtgagccaaaatgaatccccgccaagacccgtcatatgcggatacacgactgccagacatgcgctgaccgccactgccgcgtcaaacgcgtttccgcccttttccagaatgccggcccccgcctgagaagcgagataatgcggactgacgaccatttgtttcgttccgatggttgaagtattcatggcaagcccctttacaaattttctcaattataaaaagcggcttcgcggccatccacattcctgaaagaaaatctcacacactatttacttttcgataagaaataattctaagtcattacgtatcgaaaacaataaaaaatttctcccttcataccgtaatgtttcatgatacaataaagtctaccaaatgaaggaaggtgaagcgggttggaacatgaatacagcattccgaatcttgtccttgatgaaacggataaacagattctttcgattttgcacgaggaagggaggatttcctatacagacgtaggaaagcgggttaacctgtcgcgagtggcggttcagcaccgcattcagcatttactggatgccggtgtgattgaaaaattcaccgctgtcatcaacccggcgaaaatcggccgccatgtgtccgtgttttttaatgtggaggtggagccgcagtatttggaggaaaccgcattaaagcttgaaaaggagccggccgtgacaagcctttatcatatgaccggaccgagcaagctgcatatgcacggcattttcgcaaatgatcaggagatggaagagtttttgacaaaacggctctatacgcaaaaaggcgtcgtcagcgtcgactgccaaatgctgattaaacggtataaaagcagaacgggcatgaagctgtaaggaggacatagccatgaaacatccctattgggacattacggcggcgatggtccgaacgggcattttcggattcgggggcggcccgtcggtgatcccgctcatccgccatgaagccgtcaataaatacaaatggatagatgatgatgaattcggagaaatattagcgatcgctaatgcgcttcccggaccgattgccacaaaaatggccgcgtatctgggctttaagctgaaaggcacgttaggcgcaatcgtggcaaccctcgcccacattctgcctacatgtcttgctatggtaggcttgtttgcggctgtcaatgtcttaagccactcagcaattgttgccggcatgattggcgccgtcacgccggtaatcgccgtcatgctcggcattatggcgtacgagtttggccaaaaagcgcttaaaggtttcggctgggtcacgggcatcctattttttatcatcgcttttatcggcctgcaaacgctgcagatcaatcccggctttgtcattatcattttcttagcgtacggcgcgtttcattttaaattgaaagataaaatcacaaataaacgttcaaaagataaaggaatgtcggcctcatgatcatgatttatgtatttatggcgttttttgtcgcaaacgtgctcgggtatggcggcggaccggcgtcgatcccgctgatgtttgaagaagtcgtcaacagatacagctggctctcaaacgatcaattctcaaatatgctcgcgcttgcgaacgcattgccgggcccgatcgcaaccaaaatcgcggcgtatgtcggctacagcgcaggcgggtggcccgggttcctgattgcgctgatcgccaccgtcgtaccgtcggcgctcgcattgatcgtcctcttgcgcatcattcagcgcttccgccaatcccccgtcatcaaaggcatgacgctgtccgtccagcctgtcatcgccgtcatgatgctcattcttacctggcaaatcggcgcagacggcatcaaagcgatcggctgggttcaagcgatagtgattgctgggatttccctccttgccttgacaaaatttaagatgcatccggccttcctgattatcgcggcgtttttgtatggaggtcttgtggttcctcatttataaagaaaagcacctggacaggtgctttttgtttcagtcccgatatgttgttcgatatagataactgtttcttcgtctatgcttcttacatgtggttcctgtcatcctcccagatggcctgatcaataaaaaacatttgcagcctgccggactgcaagtgttacacgtgatttttccgataaaacgttcgcaaaacatgcgtttcaaggtcagccagacggacagggatcggcagcctgctttctcgattgatcattttcattgtgacctgatagctgctttctaaatcaatgttatgtccgcaagacaagaagataggcttcacgtcccgccgtgtccgcagcgcccggccatatacctcgccgtcaatgagaatatcggtgtaggcgccgacttcattttcgggcatctcaaaatcgcagcctttgattttgagataggttttcgctatcccaatcgtcggcttacccagaaaaaaagccgcatgggtggcaacgcccatatgattgtaatgcagatacccgttgccatcaaacaaaaacacatccggctccgcctccagcttttcggccgcttcgatgatcagcggcagctcgcgaaacgcaagaaaaccggaaacatacggcacgctgattttccccatgctgtgcactttttcaatcacttcttttgtatcagcgtcaatcacgatgatactgcatacgccgtacggttccccgtcctgctcccaataagcgaggtcgacgcctgcgcatgtgttgacggagtctggatggatgacgggggataggttgattctatgtattagggattgttgtgtttgaataaaatccgattcatcatttagatcaaaatcgtgaatttgatgtattttcatttcattggttttcctcattttcatttctaaaatcgtcttttcagttcaagttcttcatttcgatatacaacgcaataaaacttccataaggataatctccatcccagccacatggaaaatagcccgctttataaattttgaaaagtttttcaaaaaaattgtctgttttcccgtttactgctctatttattgcacaattattcagatctgctacgatctcttcaagaaaagtattaaattcagtcgtagcacttctgacattttccgaaaaaattttcagaagcatgtctaggttttgtggtttttgatcatcgtttaattcataaaattttccccatacctcactcatctcgttttcttttatatctttccacgcatattcatcttcaccaattacatcttcgtaagcatagtacttagctttttcttcatcattaataattttagtaaaataagagatatcatgtgatgcaactgctttaaaggttctggaaaaatcaataacttcttttacctgattatgataatgtccgtatttcattactttatacacctttcctaagtacaaccgtagggttaccaactctccggtaaccggaacgcagcctaaagccaaataatttattcagaatttacaaaacagaaaacaacaattcacctatgaaaaaaccttgaaaggcttcagcagccatcaagtttaattaatttttctaaccattccctcttataagtctaatcctcaattaaatcaagataatatttatcatttttcataagttctattaaaaactcttctaatgaatctgcaatttttatatcaccgtaatatattgaattgttttgttcattgcctaatgcaattaacgataaagcactttcatttgcttcaaaaaaaatcaatttatcttcttcaagttcctcataaacttctatatctggataaaactcaaagtcattaacttttaatcttgcatctctaattgaagcaggtccaagaatgcgattaatattatattctgattttttcagaaagccgtatccaacctcaagaagaaactgtctcaaatcataaggtaaccttaaacctaacttattttctacttctaagatttcattctcacttacttgataaaatgtattttctttgtaagttttaataaaatcatatttcacaattatttacctcctttgagtgatagagtttttctcctgtgacggggtcatagcccaacagacatttaagtcattttaaacagaaaataacaattcatttgtaaaaaaacttgaaaggcttcactagccaatcaaggtcaattaattcttctaactatcccatttttaagtctaatcctcaattaaatcaatataatattcgttatcattgaggaactttttaaaaaaatcctctaacgactcagctatttgagtgtcaaaataaaatattggattgttttctaattgtaaatctatagaaatataaacaccctcgtttacttcaaaaaaaataagtttattttcatcatcataaagttcatctaaatctgggtcaaactcaaaaattccttctcttagtctaatgtcggctactgcccctggccccaatatcctattaattgcattatcactttcacctttgataaagccataaccgacttctaaatataattgttttaaatcattaggaatatctactttcattctttgttcagcttttaatatatcctcttcagggaccttatatgttttattttctaaatgatttataaattcaaattcagccatgaactatttttacctccttggaaagcaaacattcatttttcgttcagctattcctgttacatacaaagaagcacttgatgccttaagtgcaaatcaagtgcttgtcttaacaccaatcctattcaattggccctataaattcagtaataataagaatatgttctcttaattttaccttttctagattctctactttttcagatccacctaaacctagtaaaggagtgtatccgaaacattcgtcataatcaggtttaccgtatattctactagcttcgggataaggttcccacattaattcatcattcataaaatcattatcttttaaatcatcaaaaaagaaatcaaatccagatgaaacaacatgaacatgcccttttctaaaatttaataaattaacgtatttatctttttcccatactataatatcacccattgaggtggtgaaaataggaatcgcttgctcgtacctcatataacatctttctaagatatctaaatactcgtctgggttaataacttttaaaaaaccgtttaataatgttcccaaaccatatttatcccatacttctatcagttctgcaggaagtttgtctttatatcttaaagtaattctttcatcaactgtatcgtatttaatatagttctcaaaggtatccaattaaaatgcccccttttgatattgggtcaactttacattcaaataagtattctttatttctgcaggtgacatattctctgccgttttcctaatttgctcatcaacaatatcaattctatatttccattgtgatcctaaggaggaattaactcttttatcccctaaaccaccaatactgtctgcccttctccagctatttgatctggattgtgaagcgctgcttgtgtgtccatccaatctgaagcttgtttagtcgcatcagctcttgagagtccttgctttcgcagttcagcaattttatctttaagcgcttcttgtctagccattttttgagcagaatttccttctatcgctctacctttagcaatatatctttctctatttttcaaatattcgttaactgttaattcgttcattcctttttcttgattttttagttgtcttgcaaattcttcaggatcatgttttatatttctcttaaagttcacttcaatttcacttattctaggtacatcatctaaatgccttacattacccgtacccttggtgcctttaccactacccgccatcttcacaatcccaagatctttcacagcagtcgttttcacatcagcatgaatgattgggaaagttgcgccatccgctgtgacagtcttgtggacacgaatttttacattcgtcggtactttgaattcttttacttggtctagaatcttttttcctttttcaactattgatgcttgtggcgattttgcaagcggtatgcctttgtttcaggtttaaaagctcctgcgtttatttctcctacaccaccaaggtgtccgaattcactatttatttttgttggcacaagttgcattgttttaacatcatttaattcatgccatgttaatttatttttttctcgatatttttttatatctcttgcactaattttaccagattccatcccaaattgacttgctaactcaggtgagccattaatttggtcagctaatttttgatctgattgaacaaaattagctgtcttgctttccccccataagttccttttcctccaagcatatagttgatttcaacttgtgcctttgcaattggtgaaaaatcaggaactccatttttatattgaatcccttttacaccagcctcatctgatatgcttttcaattagggtctggtggaggtttaagcgtacttaaagattctcccctaattccttaaaattcaatctttggattgatctgtgcaggtgtttgattaatccttgattcatacgatagggtatacattttgaagttatttgtacgcactctataatttggtaaaacatcatataaggcttataaggatcacctctactctctaaatagaaaacagtttattcggcactcacccccactaaaaaagccttaaaagaaaataaaaatcttttaaggcttttcattactagaggttattgattttgtctttataaacttttaaaattgttgtgtttaaatcactgatttctgagaaatgccattcaaacgtcgttagaattctatgaagttcaaataacattttctctatttcatcaccatcgttcttatccaatgaaccaaaattgtttagtataatatctaaatctctagttaacaccctaaaatcctcaaggttctcgtactgttcatctaaatcttctttatttacaatattaatacttgaattaagtttatctagtatgtccaatattccttctaactttttatccatataaattcctccactaattatttccaccccttaactactcgtccaagtgctttcttagtcttgtcagggtttaaagtaccatctaaattcaatacgtatttcacatttcccgtcttatctattacttctaaatggtctttgtgtaatgcgtcaagataaactccataaccctttttcagatattggttatcagttttcttttccaccttataaattgattgtccatcgtactttacttttgattttgataaggaattacttattttttttccaaattccatatcaaaaaactcattcatatttgaaacaggtttaacaatacccttaatacctttaccactaccagccatcttcacaaccccaagatctttcacagcagtcgttttcacatcagcatgaatgattgggaaagttgcgccatccgctgtgacagtcttgtggacacgaatttttacattcgtcggtactttgaattcttttacttggtctagaatctttttccctttttcaacttttgatgcttgtggcgattttgcaagcggtatgcctttgtttacatgcttcgccaatgcaccggctccaaccaaactcagcgcagcttccagcgccccttgcttccgcttctcctcagacactttgtttccgaacatatcacggcctgtgacggcttctgtgaatccgtttgaggcgacaaggccgtatgcgcccatttctgtcattttgagaatgtctaaggattttccggttttataggcatctaaagcatgttctgcggcaatgacggtttttccggttttgtaaatggcttttccgcctttgaaagcgcggcccgcccagccgacgaccggtatgaatccggcggcggccatcgctcctgctgtgacgcgttctgcggtggagagtttttctccggtcaccggatcaacgccttcggctgctcttttataatcataatagccggtgacttcgccggtaaagttgcagatgccgtcccatgttttttcgtaccatggtctattggcttcttcttcagccttttcctgaagccgccttgcttcggcctgctgggcttttgcgtcaatatagtccgttccctgtttttctgtcgccatgacgcttttgtagatttcattgctgtggaaggcttttttgtcatagtacataggggatgcgcttttcccgttgctggtggcttgcatgagaacagaatatttgctgagcactgcgttgtccagagattctaagttttgatattcagcggtcagggattcatcaagcgtatcgactgccgtgatcgtgtcacgtctggttttctgggcatcgcccattttgtcagcgtaatcatccagcgtatatgtgtcgagatgaataatatcgctgatgcctgacaaaattgaatcgatttctgctttatgagcggagacaatctctgaagctttcaaatccgcgttgggcagctcatgctccaaaaatgaagtctccacatatgtatcgctgagttcttgatctttaatgtcacctgaaatgccatttaaaaacgcaatttgagcagagacaagcgtcagccagctgtcggcgatttccgcttgtccctgaaaaaaatcttttatattgtctgcgcctttccctttcaaagcatcacccagatcggccacgccttgaaaggcttgtttgagcgcacgcagctgctcttcaagggcttcgtattgtttctttctcttatctgcttcgtccgttaacgattgtgattcaaacactttgctcatcggcaagtcctttctttcgttattttacggcgatcgcctcgtcctgttctttcaaagaatctacgttgtctttaacgtccgcgatattcttatgaacggcctgcttgtattcgctgatcatcgatacaagctttgcctcgcgggattggtacttggaggtatagtcgagcttgttttttccgtttgaaccggcgttcccgatcgaaacggcctccaaagcgctgctgacggattcaagctgcttcatgacggttccgtatttgagttttatttctgccattaaaaccaactccagcttcttttgattgattgtattttttctccgaccgtgtcaagggcttcttctcccagcgtcagcaggtgctctgcctctctcgcaatacttctggcggcaaggagccctcctttttcaatttcaagctgtgtcatctttaagccgattcggtaaatataaccgtcgtatttgtctgtgacgattctgtatgcttctgtatgggcctgatcgcgccggtcatcaaattcttcagcaaaagtgccggtccaatgatggtccaggtgcggcctgaggatgtccctgatttcagatacgccctcttcctgcagagattctatctctcttttcgcttcttttaatttatcaatttggtgttcaacctcgcccagtttatggctgatcgtgctgttaatatggcttaatgtgcttgaatggctcatctgttttcacctcgtcttacgcaaaaagtcgtacaaaaagcacagacttttccatactatatttccatatattatattttaaaatagacagaaagcagcttaaataggttaaatggcttattttcaacagccgagatgctcatcattaacgccaaaagactcacacaaacggcatatccattcatcgatctcctctatgtatccatgataaattccctaaaaaaaaaggagacagtgattaaccgtctcctttgccttgtatcatgatcatcatactgtcgttaactgcagtcccagttgtacaaaacgtttgagaaatcttttctcttcaaatcttccggtctgataaagaaattggcgattcccacatctccccacatcgaatcaatgtcatcatctgaatcaatttgcaaaagcagaatcgtatggttttgatgagaataagaccgcggatcttcctgggtgaaggaggcatagccgccgattttatggccgaatgcgttcgccgtatattcgtcatacacctcatcgtcaaactgctcgaaatagtcaaaggcatccatcccggcatactgcctgaattgaaaatcagacgggagcacccattcagcagacagctcaggggtgatcagcgcttcggattgaatcggaaaatcgtactcctcttcaacctgaacgaaagaaaaatcatccatgagctccgcttcttctgctgtcacatgttcaaaatatttgacgcagaaacccgtttgcacgcacccgtcgtcaaaattcagaccgtatacgtcatcactgaccgatatgtaaaactgaagaatgccggtgtccggaaaatcagggagtccgggcatgtccgcaaaattgatttgagcgagaagcttcatcggcctgccgctttcatctttaggatatggttcatgtttcggaaaataggggtctcctgcaattttactgtcataccgtcccgtttcagcttttttgacgtgcagtttgataaaaggccgtgctgacgtttccagcagaccgcgggatgattccattcgcttcggcaatttccatgttttttccacgataaatatctccttcgtctctaatgattgtatgataaaaggccggcgcggtccgccggcctttcaagtgacagaatcagtctgaggcacgacggctcttcttccgattgagatatattccacgcccgcctgttccgcttcctcaagcgagtggcagtttctcccgtcgaaaataaccggggtttccatcagctctttgtacgcttcaagcgggaagtgtttaatttgttcccaatctgtcagaatcaggacggcatccgctcccctgacggcttcttctatggactcccgataggaaacttcagccggaagcagcccggaagcccggaatgaagcgatcggatcgtacgctgtcatccgggcgtcaagagccgccagacgatccgcaatgacaatggacggcgcgtcccgcatatcatctgtattcggcttaaaagacagccctaataacgcgatggtcttccccgtcacaccgccgagcctgttcagcactttatcaaccagcatggactgctggttattgttgactttaatgacggacttcagcaattcaaaatcatgctccacatgtcccgcaatctgcacgagggcgtttgtatccttcggaaaacaggaaccgccgtaaccgatgccggctcttaagaattgattgccgatccgtttatccaatcccattccgtgtgcgactgattccacatccgcaccgactttttcacatatatgagaaatttcattaataaaactgattttcgccgctaaaaatgcgtttgacgcatatttgatcatctcagcgcttctgatgtccgtatgatataccggaatcgcaaacggcgcgaaaacccggtcaagcgtttcccgcgtctgccggtcttcagccccgatcacgatgcggtctccgtgaaaggtatcgtgaattgccgaaccttcacggagaaattccgggttcgaggcgattgaaatgttcacgtccgctttcagccgtgaatgaataacttcgctgatcctgtcattcgttcccacgggaaccgtgctttttgtcacgacgatcgcatctttacaaatatgttcggcaatccgttcggcgacattttcaatataagcaaggtttgcgtgcccgtcttctttttgcggtgttccgaccgctataaaaataacgtccgcttccgcaagccctttttcgtagctcgtttcaaatgccagccgatgccggccgatatttcgtttcatcatatcttcaagtcccggttcaaagataggggacaagccctttctcatctgctcaaccttacgttcgtcaatatctatgcatgttacgtcatggccgatttctgaaagagacactcctgtcacaagaccgacgtagcctgttccgatcactgttattttcatcgtgttcccccaaccgtttagaaattgctgctgggcagcttaccgttattatcatatgattccggcgccggctgaatgccggaagcctgaggtcatgataggaaaaaacgtcgccggccgctgataataagcataagcataaaagaatcatcttgcaaaacagccgcttacgcttcatttaaacgggatggagacgacgattaaaaaagaccccagcgcttacggcgggccacaggcagcggaggttccttataaacggctttgttttcagcgagaagcgccgcgttttccgtgagcatgtaaatcagctcagcccctgcttcttttttcagaacgccgagcgcctcctgataataaaaatttctcggtccgagattatgggcgtcggatgcgagaaagtggatcaaattcgcttccatcagctgcagcgaaaaggatttcgctttccgcccgaatgctccggcaatgcagccggccgtcacttgggcggccgcgcctttcttcacaagactgtatagaacggaagggttttcgcgaatttccctgttccgctccggatgggcgatgacggggacatatccgttcagctgcagttcataaaacagcctttcagcgtaggccgggacatgatccgccggaaattccgccagcacatacttcgtatcatggagcgggacaagcgagccgctttgaagacctgtcagcagatctccgtctgttctgatttcctggccgggcagaacagtcagcggaatgccttccttattcaaacgtttgtttaacatgctgaccgcttcgttgaccgtatgtcggtccgtgtcatagcggtatttcacatgatgcggtgtcgcgatgatcgtatcaatcccctgtctgaccgcttctctcgccatcttcaggctttctgtatcatccgccgcgccgtcgtctatggaaggaaggatgtgacaatggatatctatcatatttcaatccctccttaaaaagaatggaccgcgcccattatgacattattgtccgtaataggcgtagtccgagtgtttcgtttgtttcttcccgttcatcacggccccaaggagcttgcacgggcagtaatcgagcgcttctttcgccttggccgctttttccttgtccgttttcccgcttgagatcaccataatggccccgtcagtgtagctgcctaatattttcgtatcggctacggccaaaacgggaggcgtatccaaaatcaccttatcataaactgcgccggcttctgacagaagatctttcatggcgcccgtcgataaaagctccgccggattgggcgggatcggcccgctcgttaaaatatccaggtttgcttcatcagccggcaggacggctttctgaaacggcatctgttttaacagcagtgacgttaatccggttccgttgtccaatttgaaggtgaaatgaaccgtcggtttgcgcagatccgcatcaattaaaagcacttttttcccctgctgtgcaaatacgacggcaaggttggccgcggttgtcgattttccttcttccgggccggcggatgtaatcaaaagggacttcacctccgtatcaacggaagaaaattcaatgtttgtgcggatcgtacgatattgttctgagttgatggatttcggctcagacatcgcaatcacacttcgttttccgagtttgtcttttttacgcgtcaacatgtccgccccccgcttgtttggtttccgccatcctcaagtttttggcaacgctgtcttttgtactgattgaagtaaccgttcccaggatcgggatgccgagcagcgattccagctgttcttccgatttgatcgtattatccagatgttccagcaaaaaggcgagaccgattccgcccaaaagtccggcggcaaacgcaatcgcgatgttcagcttacggttaggctctgccggtgactggctgtccgccgcttcggcctttgaaaggatgctgacattatccacgttcatgatggcggtgatcttgtcctgaaaaacggctgcaaccgcatttgccataacggccgcccgcttagcatccgtatccctcacggcaatcgtcacgacttgtgaatcctgctcgctggacactgtgattttcgattccagctctttcgaagtcatggacagatgcagctgtttaatcacttcgtcgaggatgaccgggcttttgatgatgacattatacgtgttgattaattggaggttggtttgaacgtcattgaattggacttctttttgattgtttttggattggctgaccaaaatttgagttgagttttcatagaccggcgtaagagcgaagaaactgatgagtccgcctgcggcagttgccgccgcggtaataataagtataaacagcagacgctttctcagtattgcgaatatttcctttatgcttgtcgattctcccatataacctccatatcactttccgcgtattcccattccctccaatgatcttttccaattacgattatacagttttaaactgtcatttctaaccttttcaaatgacaaaattcgacaaaaatagacaatcacttcaatctgttttatttttgtaagcgctttaaatactggtgtcacaggaagattaaaaaatcccgcggcaaagagcctgcgggattttatgttgcatatccatttttaatataagaaatcaaattctcaagcatttcttttgtggtcatctcagaggactgctcaccaatgtcgtgcgcatgcattaaaatcttcagaaactcctcttgatctaacttcgttttcttcatcattcgtttcctttcggcttccattaaattgaaaacaagattattatatgctgtcggatgctgttttgcaatctctaatacatcattcgacacattcgggtttttatgtccttttttaggaaaaactttttccgggccatgtgttgcgatataatagaggaattggaatctttttattttgtgactcgttaggagcgataatcatgcttcaggatatgattgctaaagaagatgtgctctcagcggctgaacagcttaaagaacttcttccttacaatgaagacaatgttcagctgatgaagaaagcactcattttatatcggcaggattccgtctatcgtatacaggttcaaaccccgacagagatttccgcatatgtgcaggatgttgtgcctgtaagggtcacgctgaacttatttttcatggtgaaaagcggctgcgcatgcccgtctgaggcgatctgccgccacgtgctggccgtttttctttacgtatatgcccaattcgagcgggtcggtacctttaccgaacattggctggaaagagaaaagcttgaggaaagcagggagcttgtccgccggcagtttcaggaaaaagtgctgccgaatgaagagtcgctgtcaagctggctcgctttttttgattcggaattctcgctgtgggaggcgcggacgccggccggaagccagacgatgcagggcctttattacggctatctgtcagcgctcaaaaaacacgccccgaaaaaacccgagcttaaaagcttatatcagattcattcggcgcttgccgtctggcttcacatgttcactttgattgagtcaggcagattggatgccgaaaaagattattacagcatcaatccatacgtggaacagctgatggatacgatttattcctccattgacagactgaaaacgtacgctttgtctttttcactcgatccctttttagaccggacgcccccggtgctccgcagactgcttgtgaaagaagagctttttcaatacgaacgcctccgggtattcggtgaaatgtggagcgcgcttttgaaccggccgaaatgggtcgcgcgtgaacaggagattctcgcacaggaaagcgggcgccgtttttcgccggaagtgcggttcggacggcttcatctggcctttttgcaaaaagatgatgaagcggtcttccaagatatgtcccgcttccctcctgaagcgctgccgtatacctttcaatggctcggtgaactcaccgcgaaaaaagactggaaacggctgaaaacatggtatggccggatcgagccgcttgccgtgaactatacgaagcttgataagccgtttaaagaaatgcgcgacattatcggagagctgtttgcgctattggcggattatgcgcggcactcacgggatgatcagctgtttgaacggtttgcttccggctgccttccctatacctttaccgaatacagccagtacctgtatgaaaaacgacggtacgcggagtgggtggagattcacagcctcgtcggtttttccgtctgggaaatcgaaaaggacatcctgaaggaaattgccgccagtgatccggaagcgctcatcccctcctatcaccgggcggcggccttttttatcgaccaaaaaaaccgcagcgcctataaagaggctgcgcgccatctgaaaaaactgcggacgctttataaaaaggcaaaaaaacagcaggtatgggagcggtatatcagccggctgagcgcaagttacaagaggctgcgcgcccttcaagaagaattgcagaaaggaaagttgattgatggcgagtcttaaggaaattttcattcatgtagaacaaatggaagattggacatttacgctgtcaagccatgatgagaaggagcagccgcttactctcagtcagatgaagactcatttgttccaatggcatgagtccaccttttacggaacgtttcttgaagacgtcagcttcatcggcaccccggccgttctgctcagcccgtggatgaccgtcgagctgctcggaaaaaactcgttcaattcattcagcaccgtgcagctgacaaaggaaacggaaccgttaatcgaagcggcttcgacgatatacgaatttattgccgacggcgattttcttccggattatgaggcttggcaaaatggcgtcctgcgtttcaaagaccgcgagcttttgctggaaggctttacggcagactggttctcagccgcggtccaggactacattcagtacaatgatgacctgctggaaaaatggcggcagatcgaaacccgctcgccggccgttcatacgtttaaaggctcctttttggatgaagatgattttctcgagggaatcggctggcatgacgatctgacgccgtttaccgtcgggctccgattaaacgagcctgatttcgacggtgacgactggaaaatcgaaatgtttttacgtgagaaaaaaaccggctccatcaccttttttgacggactgaagggactgaaaaaagcgtggcaggcatacagcggaaaaatcgcgcgcgaacaggaccgcttccgcagaacggttccctggctttcgtttgattcaggaacgacgctgatttctgaagaagaggcttggatcttcttatcggaagcgagtgagacgcttgtcgatatgggtgtggagattcttctcccatcatggtggcagattgtccgggacagcaatatgatgctcaaggcgaaagtgtcatcctcgccgcggggcgagtccttcgtcggcatgaacgctctgcttgatttcaactggagattcgccacaaacggaattgagctgacagaggatgaattcaatgagcttgtcgcaaacaacagacgtctcgtcaacatccgcggccaatgggtgaaaattgatccgcaatttattaaacagatgaaaaaactgatggaaaaagcggaatctgagggcctccacatgtccgacgtgctggcgcgcgaactgatggatcacggggaaaacggagccgaggacacggacatcattgactcatcggcatttgccgggatcaaaatcgaattatcaaagcagctcagaagcctgatccgcaaactgacggaagcccgggatctgccggaacatggagtcagcgccgcgtttcagggccagctccgcccttatcagatgtacggcatgaactggcttctgtttttacgggaaaacggcttcggcgcctgtctcgcagatgacatgggactgggaaagacgattcagatgatcgcttattttctccatgtgaaggaaagcggccggcaaaaagcgcctgccttaatcattgcgccgacatcggtgctcggcaactggcagcgtgagctccagaccttcgcgccgcagctgaaggccgtgcttcattacggcccccgccggccgaagggggaagcatttgtcccggcctatcaggacgcggacgtcgttcttacttcttacggcctgtcgcacgccgatcaggaagagctttcttccgtgacatggagcaccatctgccttgatgaagcgcaaaatattaaaaacgcgcatacgaagcagtcccgcgcgatcagaaagctgaaaggcgtccatcatatcgcgctgagcggaacaccgatggaaaaccgcctgacagagctttggtcgatctttgattttatgaacaaaggctatctcggcagtctgaccggctttcataaacgctatgtgctgccgattgagaaagaccgtgacgaaaaaagaatcaaccagcttcagcagttaatccggccgtttttactgcgccggacaaaacgggatgaagaagtggcgcttaatcttcctgacaagctggaacaaaaagagtttatcccgctctcagccgaacaggcatccctttatgaacagcttgtcaaagatacatttgaacatatggcttctctgaccgggatgcagcggaaagcgctgattttgagcatgctcggccgcttgaaacaagtatgcgaccatcctgcgctctatttgaaggaagaacagacagagctgttaaacgggagatccgtcaaactggaaaagctgcttgatttaatggcggcgatccgcggacagggggaaagctgcctcattttcacccaatacattcagatgggcaacatgatgaagcgcctcctggaaaaagcattcggagaaccggttcagtttttaaacggaagcctgtccaagcaggaacgcgattctctcgtcgaacggttccagaagaaagaatacccgacgctgattttgtcactgaaagcgggcggaaccggcttgaacctgacggctgccaatcatgtcattcactatgacaggtggtggaatccggcggtggaaaaccaggcgaccgaccgcgcctaccgaatcggccaggaacggttcgtccacgttcacaaactcattacgacgggaacgattgaagaaaaaattgatgtcatgcttgaaacgaaacaaacgctgaacgatcagattatccaaagtgaaaattggattaccgagctgtcatccgctgagcttgaagaactattcaccctcagcgcatcggcgcaatcacattaaacgcaaaaaggccggctctctcagaagagccggtcttttatgtcgtccttactgttacgccgcatttgccatgaatgcgtcacgccagtcatgaacagtatcgccatacctttcacagtaaattcctgatcatatgcgcaacgccgttttgatcatttgtcaatgtaacggcatcagcgatctctttaatatcttctctcgcattccccatcgctatgccttttccggccgcctgaagcattgaatagtcatttaagctgtcaccgaccgcggcggtttcagccatcggaatgccgagcttttgcgccagccgtttgagagcctgccctttagaggcgtttcgagacgccagttcgaagttgtgatcggcagagctgacaagggtgagatctttctgaccgctgaatcgatcccagcccgctttcagcttccgctcatcaaacgaaaatccgagaatattataaaagtccagatgctcttctttctcaaagagctcacggtatgaatgaatgtaagcaaagccggattggctgtattgcactgaagccgcctgttccaaaacggaaagatcggtttccggattggcgcttttcacccggtccatttcgatatcgagcagctgcctgccggtttcaggcgtatagatggctttgtttgtaaacacctcatagtaatattgattctcttcaagccatgacaaaatgccgcgggctcttgtttcttcaatcgcatcacagtggtacaggctgccgtcaggagcatgaatggcggctccgtttgcgctgatgacccacgtttttatgccgagcggttcgaatagggagtgcacgtcaaaatgcgcgcgtcccgtggaaaccacgatttcaattcccgcttgccgggcttcccttaaagcccgctcattttcatcgcttacttgatgactgctgttcagcagtgtgccgtccagatctatggcaatcagtttcacatgtcctcatcctcttcttcagattcagttacaagcaattctacgccgtgccggtcgagcagatcgcaaaaatcctgatcaggcagccgatcggtaatcagcaggtcaacctcgtgcaggtctgcatactgataaaaactcgtacggccaagcttggagtgatcgctcagcgcaatcacctgttcagcctgtcggatcattttacgctttaccatgccgtcttcttcatgcggaatcgtcaggccgttttccgagatgccgacaacgccgatcagcaccttatcggcgtgataatcccccagtttttctacgacggaagccccgtataaaaaccggtgttccttctggagctttccgccgagcaggtgaatatcaattccctcttttgcggaaaggatatcggcctgattgatcgaatttgtaataacagtgcagccggtgacatttaaatgctccgcgcaggcctgcacggttgtcgaagtgtccaggatgatccggtctcctttatggatcagggatgcggccagcttgccgattttgtttttctcttcagaaacggttttcagccggcccgaatagcccggaacttcctgattcaccgacggcagaatcgcgccgccccgtgttctgataatggccccgcgctctttcagctttacaaggtcccttcttgcggtatctcttgaaatatgaagcagcgaacatatctgttcagcggtaatccgccgatgctgtttcaaatattccattatcgcaatcagtctttcttcttgatacacgtcctcattccctttttcgtcacttatctgtaagtaattataagtttttatcccaatatattcaatgtttttaagtattcataagcaaaatcacttctttttaaccattttttagcttccgcacaaaaaaaccagtctttcgactggcgagtgggaaggaggtattgcggggcccgctgaaaggcgggaaatcgaggaaaaaacatgctattcagccagcggctctttccgtttttgatccataaaccgaacggtatcagccatgacctcggtcacataaacttttacgccgtctgtcttttcatagcttcttgtctggattctgccgcttacaccgaccattgaccctttttggcagtacaatgccgtgttttcagcgttttttctccagatggtgcagttgacgaagtcggttccggtttcacccgacgcgcttttaaaattgcggtttaccgccaacgtaatatgtgcgacgggaatgcccgctgctgtaaaacggagctccgggtctttcgtcagccggccgacaagcataacgtggttaaacaagccgtatcctcctctctttttcgaggctggcttcattgtagtacaagggctcgtgaaagcaaaaagcggataaagccgttattcgttcaggctgctcttatgtttttgtttttctttctgataaaaaaaacttttgtttttgaccgcttatgtaatatgtatttttgagcagccgcgagaaaagtttcgttttgagccagtctttctcaaacatgcggacaaactttccgccgtcccatgcgaaccagtaaaaactcagctttttatcagtcagtgaaagctgaattttatactgttccatgcggtcttttgtttcatataaaaagacgacatttccccttctgttaagatgcacctcacaatcttcctttttgcataccaagtaggaatgatcgtcttttcgccttgaaccgtcttctatatagatttccttcaggcgcaattgattcataagcatctctccatgaccatattcttttacattataatgaaaaaatagaaatgattaaatgttgaccgcctacaaaaatgatgaagcatgtcttacagcattttcccggaaaaaatgatatgtgttataataaatgaacgaaaaacatggacaacaggggtgaaaataagagatgaaaacctttaaactggttgatctgaatgtggaacgtttagataaagacgatcagccgattgagcagtttccccttttagacggattgattatcaacaaagaggacggagaaaatcactggttaattgaagcactggtcccggccgaacacttgtctttttttgacatgctgatgaaaagccagaaagaagcgaaggtgtttgtaacgattacgaaaaaaagcaaccgccccgcccagctgacgggaagcatcaaaaatatcgtcgagctggaaagaagtatacaagttttaatttacggtcaaatggtgtcaagaaaccaccccggatcagaaagcattctggagtcgctcgtgaaagaaggctactcgggcagccggctgattgaagcgtttaaacaaaaattataatcatgaaaaaggccggacgttaatcatccagcctttttttgtgccctagtcattgtgaggagcccgctgtttcagcagatctctgatttcagtcagcagttctgtctgctgatctgtgtcttctgcttcttcagcctcttcttctgcttcttttttacgtctcagcttgcctattgtgcggatcacgataaaaatagaaaatgaaataataaagaagttcacaatcgtttgaatgaagcttccgtacttgatatgagcatcgccgaatgtcactgccagccctgaaaagtcaagaccgccaagaagcaggccgacaagcggcatgatgatgtcttcaacgagcgacgtcacgattttgccgaaagcgccgccgatgacgacaccgatagccagatccatgatattgccccgcatcgcaaagcttttaaattctgaccacatcacattcacccctttctatacaaaatgggctttttataagcccatttgtttgcttttattctccgagcgcaaaagttaattcagcttcacacacgagctcgccgtcaactttggcaacgcctttgccgcgtccgatcgtaccgcgcgcgcgggtaatatcaacctcaagctccagcttgtcacccggttttacctgctttttgaaacggcagttatcaatccccgcaaaaaacgcgagtctgcccctgttttcttctttaatcagcatcgccacagctccgacctgcgccaaagcctctacgattaatacgcccggcataacagggtattcaggaaaatggccgttgaaaaaatcttcattcgccgtcacatttttatatcccgccgcccgttttccttcttcgacttccgtaattctgtctaccagaagaaacggatagcgatggggaataatttctttaatttgctgagtatcaagcattctcttgacatctccttcatcgacaatagtatgtatagaaggcatatgtggcaaccaatctgtacatttggaagtatattatgaatcaatttctttttcaaccgcgctgtaaactgtaaccagctggcaatgagcctcgtccattaatgtgttatgataaataaagatttttaccctatgcaaagaggttggaagatgattgctaagtttactgaaaaacgtacgctggtgatgctgaatgagtggtatgacgccatgggaaaacgccaattcgatctagcccgttcccttcacgaacaaatcaatcagcatctccccaaattacaaaagaacgcaaagctcaaactcagatatcagctgtttttcgcacggtttcagctgctgtttgagaaaaaagacggtctgactaaattgttctgcgagctgaagcggcgcaaagatgagatggatcatgaattaacttattatttctattttttcaaagggttattccatatggtgaatggcgctccgaaccgtgctgtctgccgctttaaagaagctgaacagtacctgccggccattcaggaccgtttcgaagccgctgaattttattataaaacagcgggtgcatattacatgatgaagtcgcctgcgctctccattcaatatgtcaataaagcgctggaaatctatcaagatgaagccggctacatcaaaaaaacgctcagctgccggctgcttctcgccgtgaattatatagacgaggcacgctatgacgacgcagaacagctcttcaatgaatccataaagataacggaccggatcaatgacaataacctgctgtgccacgcctattataattttggttttttaaagaccgcccagaaaaaagataaagaggccctccctttttacaaaaaggtattgggcaatcagcgtttcgagaaagagtctcccgtttcctaccttcattgtgtgtatgaagcggtcagagcactttttaaaaccggatctgccgccgaaggacaaaccgtgctgcagaaaggtttatacatatctgaaaaagtgcagaacaagattatgaaattgaagctgaccgcgctcaacatactgtacaccgctcaggaggacccgtacgaccgattgcagaagctcgtgctggagctgcagaaaattgaagcgtgggtggatttggaagtgctgcttcaggatattactgattactacaaaaaaaagggcgattttgagaaagccgcattttttatcatgcgcggctgatcaaaacgccccttcttttatctgactgagttgattaagcccagcatttggtctcccaatgtaatcgtgcggctgttcagctgataggaacgctgagacacgattaagccggtcatttcttttgacatatcgacatttgaaccttcaagcgcgccctgctccatgccgattgcctgccggtttgcgccggtaaggtcttcaatcgctgaagcccccgcgccgtttacggaaaacagattatccccttccgcatgaagcgcctgcggattattgacattgacgatgccgagattaaacgtctgcgaacgggttcccgcctggtctgaagcagtcagcgttccggttttgctgattttcagctgagtcagcgaactgtcaatttgtatgggctgaccgttctcatcgagaatgggattgcctctcgctgtcatcagctgaagcagccggtcatttccgccggccggcttgagggaaagtgagccgtcccttgtatacacccgccgtccgtccgcttctgcctgaagatattgataaggtgatgtgaacgcgatatcaaggtcacggtcggtttttttgatgcttccctgccctgagtccagctgcggagtcatcaccgttccggcgccgagacgcaggccgggcggcgttttccgcatgttcggcgaattttcctttttgtcatctatatggtcatattgctgtctgatcagctcggaaaagcgggagtccctcgctttatagcctgtcgtatcactgtttgaaaggttgctgctgactgtatccatctgctgctgaagctgatgtaaggctgttgaagccgtcagcattgatctgagcatcataattgaatatcccccattttgttacactttgccgatttcatttgcggctttatccatgcttttatcgtaagcctgaatgactttctgattggcttcaaatgatctgtatgcttccgtcatttctgtatacgtgctcgtcacgtccacgttcgaaagctccgagacgccttgctttaatgaatacgagacttggggattcgccgccgcgctcggcagttcagagccgtcggccgtgctgtataggtcattgccgtcccgtttcagattgcgcacgtcttcttccattctgatatcaatctgccccgccggccggccgtttgtcgtgaccgttccgttttctgatacggtgaatttttcattgtcgactgtaatcggctgtccgtttgttgataacacaaggtttccgtttatcgtaagctgattgttttcatttaatgagaaagtgctgctttttgaatagcggacgccgcctgcggtctggacgggataaaacagctcggcgttttcattcgtttcggcattcttgggaacctgattctccataagcgcgatatccgtcggctgatcggtcgttttcaggcttccctgcgtaaacaacggtttcagctcctgcatgtatacgcctgtgttgacggagccgattttcgtttttttgtcgccttctattcggctcagaagcatctcgggaaaggcgcggattgaaccttgatcctctttgtaccctgatgtattcgcgtttgcgatgttatttgacagcatttccgttcttctctgctgtgtaatcattgcggacgttgcggtatataatccttttaacaagtcttccacctctgaaatagcattatttccagttgcctcaccggaacatttgttctataatgaaaatcagcattttttcttattatcggatttacattcccgttcgtgaagggtttgacagaaaaaaaccccattctttttcagaatgaggttttatcatcagctcagtttgcgttttggaagcttgtccatgttatccagcatgacgccggttccgaccgcaacacaatccatcgggttctcagcgacaagaacaggcaccctcagctcttcggcaagaagctggtcaagcccgtttaacagcgctccaccgccggtaatgataacgccgcggtcgatgatgtcagcggacaattcaggcggtgttctttcaagaacctgcttggcggcctgcacaatgacggcaactgattcacgaagggcttcttctacttctttgctgtttactgtaatcgttctcggcagaccggaaaccatgtcacggccgcggatggtgatttcttcatgacgtgcgtctgggaaaaccgttgcgaccttcaccttaatatcttcagcggtacgttcaccgatcagcagcttatactcgcgtttgatataatttaagatttccatgtcaaacttgtccccagccatcttaatagaagaggaggtgacaatatcgcccatagaaataactgcgatatctgtcgtaccgcctccgatgtccacaaccatgttaccgctcggctggaagatttccatacccgcgccgatagcggcaactttcggttcttcttcaaggtacacatgctttccgccgcttttttcagctgcttctttaatcgctttttgctcaacggatgtaatattcgtcgggcagcagatcagcatgcgcggttttgagaaaagtccttttacattcagcttattaatgaaatgtttcagcatggcttctgttacttcgaagtctgcgattacgccgtctttcagcggacggatcgcaacaatattcccaggtgtacgtccaaccattcgtctggcttcttcaccgacagccagcactttgccgctgtttttatcaagtgccacaacggaaggctcattcagaacaattccttttccttttacatggatcagtacatttgcagtaccgaggtcaattccaatatcccttgcaaacatctatttatatcctccttgatatctgtttcacagtaaaatatccacattgtgccctaattatatatattatcataatttatcaaaaaaaagctgctgaacgatataagttcttgacaaaattttgcggatattcgcgaaaccgcccgggaggagaaaaaagggcccggcagacgtcaggcgctacggctgctgaacgggctccccttcaagaatttcatccttcttgtactttaatttcgtcgcctctccccctcttaaatgtctgatggatttatgataatcgagtatttcttttacttcattcgccaagtcaggattgatttcaggcaggcgctctgtcagatctttgtgtacggtacttttggaaacaccaaactctttcgcaatgacacgaacggtttttttcgtctccacgatatacttgccaatcttgattgttcgctctttgatgtaatcgtgcacaccactcgacctccccagttggatgtgagaagtgtgaaatgagatccgtattctgtaacagattcactgatgatgcagcttcttcgttgtccgattatataagaaggttttagaaatatgcccacgatccctcacctcaaacactctctttgataggtttgtaacagtgtattagcaatgaattgggaatatgctaaaaactcaataaggacaaggggcgggtcataattttctgctttttggtcggggggtttacatccgcgtgatcctgctgtagaatgaaacagcacaattagttacttaggtaagttttttgaaaaggggaacggaaatgatccacgtcaacagacgcctcattcaccaaatcaatcaatgcgcccgcctgattacgaagaaagccaatgaacggctggaaccattcggcctgtactcctctcaatggtcaatcctatattgcttaaaaacgatcggaccgatgacccaaaaagaaatctggtcctatctgaacgtagaggcgccgaccgttaccagaacgatcaaacgccttgaagaaaacggctggattcagcgggaacagggagaagacaagcgggaaaagctcgtcgtcctgacgaaggaagctgaattgaaatacgacagcatcaatcaagagatgctgaagttcgaggaagacatgcttgcggatttccaagatggagataaggaagctttttctgagtttctgaatgtgtttttaacgaaatagaaaagaaagggaagtgctgtacttttgagtaaatctgactcgatctggaccaaagattttattatggtcgtactcgtgaatttatttgtctttgtgttcttttatacatttttggccgtgctgcctatctatatgattcaggagcttggcggcagtgaatcgcaaggagggcttttgatcagcctgttcctgttatctgctattatcacccgtcctttttcaggggcgattattgaacggttcggcaagaaaagaatgacgattgtatccttggcgctgttcgccctgtcttcttatctgtatttgccgctacacaatttctatctgctgctcggactgcgttttttccaaggcatctggttcagcattttaacgacggtcacgggcgcaattgccgctgacattattcccgccaagcggcgcggcgaggggctcggttattttgcgatgtctatgaaccttgccatggcgatcggtccttttctcgggctgagtcttgtgaaagtcatttcgttcccggttttctttacgatttttgccgtatttgtttctttaggcttgctgattgcttttatgattcgtgtgccggatcaaaacaacagcggaacgactgtcttccgtttttctttctccgacatgtttgaaaaaggcgcgcttaaaatcgcgattgtcgggttgtccatttctttctgttattcaagtgtgacttcatatttatccgtttatgcaaagacgatccacctgttggatgtcagcggctatttcttcgtctgtttcgccgtgacgatgatggccgcccgtcctttcacaggaaagctgtttgacagagtggggccgggaatcgtcatctatccgtcgattatcgtgttctccgcgggactttgcatgctggcgatgacaaacagcgccctcatgcttctcttgtccggtgccgtaatcggtctcggatacggctctatcgtaccttgtatgcagacactggcgattcagaactcgcccggacaccgttcaggctttgcgacggctaccttcttcactttctttgacagcgggattgccggcgggtcatatgtattcggcctctttgtcgcttcggccggattccattcgatttatctggccgcggggctgttcgtcctgattgctttgctcctgtatggctggagccagaaaaaaagaacgccgcttgaagcggacggaaacgtttcaatcgcagactgatatgacaaaaagccgggggcaacccccggctttttttattcggccgctctttcccgcacgattcgtccctccgcttttgcataaggaggatgaatatacataagcgccgtataaccgatacatgacaaaatgacacccgcaaaccaggaaatatcatagatgccggcgaacgccgggacgtacatcccgattaaagaaataaacgcgccgagaaaggtcgcggcaaaggcccggtaattatagcctttgtaataagtgtactgtccggtttccgaataaaggtcttcaactgagagccgcctttttctgatgataaaataatcagccatcatcaccccggctaccggtccgagcatcccgccgatgagtccgagaaacgcataaacattcgtggcgctctccatcagcttccacggtattgtgaacagagccaaaacggcggtcaaatacccacccctcctgaatgtaatatacttcggcaggacattcgccaagtcataggccggtgacacgatgtttgccgccacgttaaccgagacggcggcgatgcaaagtgtgatgaccgaaagagcgataacaaaaggattatcaaaccgggccaaaatctcgaccacatcccaaatcggttctccgaatgctacttgtgatcctgatgtcaccgtgatgcttgcaaacgcgaacagcgcaaacgttcccggcagcccgtaaaactggccgcgaatctgttctttttgcgacgcggcgaaccgggtgaagtcagggatattcagaatcagcgtcgcccatattccgataatgcccgtcactccggcggcaaacggccaaaacgtttcagaaaaggtatggaactttcccggctgtgagtaaatcggtccgagcccgccggcaatatctatcgcccaccagaccatgccgccgaagacgagataaacaagcgggcccgcccacacttcaaattttttgatcgattccattccgtgccgcagcacaagcagatgaatgccccaaaagaaaataaacgacagaaaacccggcagatgaagcccgaatatattccaatctccgccgagactcccccagcccggccatatgttcaaaagcagaatgtgcaaagccgtgctcccggcaaatgtttgaattccgagccacatgatggctgtaaacgccctgagaagcgccggaatgttagcgccgtatattccgtaagaagccctgataatgaccggaaaaggcagtccgtatttcgttccggcatggccgttcaaggccaaagcggcgaacaaaatgagtgacgccgtcacgataatggcgagcacctgccacggagaaagaccgatcgcaatgagcccgcccacagtcgcgtaggtcgggatattatgaatacaacccatccagatggatgcaaaattcaccgctttccatgtccgttcgccgtcttctaaaggcagtaaatctttgttgcttagccgatcactcgttgtttttttcattttttccctcccgcatgtgcgttttccttacatcacatgtgaaaaaatataactgaaaattccgtaaataacattggtcgctgtcgacaataatcgttttgatttttgagcacattacacaaaaaaagagacggggagagcccgtctctttttgttgcgcctgttaagaggcttttttgaggagaaccgaaaaccggaacgccatcaaaaggcttacagcgccgacaacgataagaatcgtcccaagcatatgaaaatggccggcggtaatttcttttccgaaaagaatgcccaaaatgacagaagacaaaatcgaaccgagataccggcaggtctgaaacaggccggacgttgttccggccatgtcggcggggctcgttgtcagcatggccgcctgaaacgtgacatttccgaagccgtagccgacacccagcacggacaggatcagtccttttcctatcatgggcgcctgaagaaagaaaaacgttaacagcaccgccccgatcgcggtcaggcaggttccggcaacaatcggctgaagaagccctttcttatctatccattttccggtcagaggcgacaccagaatactcatgcccgacataaacagcataatcaacccgcttgtctgaacggacaaatgcatttcatcctgaaaatagctcggaagcccgaaaaagatgcagtaaaagaatatattcagcaaaataaattgaatatacaccgacgatagtttccggtgcgttttaaacagcctgacatcaataaacggcttctccgttttcagctcgcgccagataaacagcccgacaaacaaaagcccgaaaacgccttctgtatagtgaggcttcgtactgaaggacaataaaaacgacaggagaaggataatcgctccggcaaacagaaatatcccgatcgtatcaagctggcggagcacgcctttcaatccgccgatctcgcgtttttcatctttcggaaacatatacattccgagaaaaaagctgagaatgataaacggcagattgacgaaaaagattgccggccaccctccccaaacgatcagaaaaccgccgagagtcggaccgagcgccgtcatggctgatgcaaagattgacaggacggccagcgccgaagcctgcttctcccgtatatttgaacggatcaatccgacgccggacggatatatcgcgctgcttccgatcgattgaaaaagccgcatgatcagcaaagtcataaaagtcggcgcaaacggcgcgccgaccgccgagacggcaacaagcagaagcccgataaaaaacagcttcttcctgccgagcatatcaccgagcttcccggtaacaggctgcgccaccgcgctggccagataaaaggacgatatcagccaggacaccgttgtaaacgacaggtgaaattcatgctgaatactgtgaagcgcaagagaaatcatcgacgagttcaatgggttcagcatcgtccccgaagccacggccgtcaagaacaggacgcggctttttttggagattgtcattttgtctgtgcgataaattcttccgtcgtccggcttctgccgattttcgggaagataaacttgagtgtcgcttcgtgctgttcatcgctgaatgtcgccatcgcgtcagttacgaaaacttgctgatacccgagctgaaaagcttctcgcgccgtgctttccacaccgatgtttgtcgcaatcccgcataacacaatcgtgtcgatcccccgtcttctgagctgaaggtccaggtccgtgccgaaaaacgcgccccactgccgttttgttaccgtataatcgttttctttcactccgatgtcaggcacaaattcagcccaatccgccggcggagccgaatggcccgccgcctcttcatccgtcagcggcttcagcgcatccgctccgtcatgaaaatccacgttcacaaagctgataaatccgcctttttcccggaacacatcaattaattttttcgcgttcggcacaacggtaccgcttttatcaatcggcacaatgcctttttgtaaatcaataaggaccaaagccgttttttcaaattgcagatttaatgatgttgtcataatgattcctcctgatgcagttagtgtttctcaccccgtttattttactctttcccggacaggatttcttacgccgtgctccggcgctctttttatggatataaagtcgcacgacacccatttgaaaaagcagcattatgaacgcaaaaaaccatgttagataaccttacacgaaaatgttttatcgttcttttttctctataataatgaattaatcacaattacattctgaatgagacggaggaatacaacatgcagatgggcgatacagtatttatgttcttttgcgctttactcgtgtggctgatgacccccgggctggctttgttttacggcggaatggtaaaaagcaaaaacgtgctcagcacggcgatgcatagtttttcttctctcgccatcgtatccgtcgtttgggttttgtacggatattcacttgcttttgcccccggcaatacatggcttggcgggattgaatgggcggggctgaagggggtcggctttgaacccggaagttacagtgatacgatcccgcattccttgttcatgatgttccaaatgacgtttgccgtactgacgacagccattatttccggagcatttgctgaacgcatgagattcagtgcttttcttgtattttcctttttgtgggcttccctcgtatatacgcccgttgcgcactgggtatggggcggcggctggatcggccaaatgggcgctcttgacttcgcaggcggaaacgtcgtccacatttcttccggagtcgccgggcttgtgctggcgattgtgctcggaaaacgcaaggacggcacggcggcttcgcctcacaacttaatttacacgttcttgggcggagcgctcatttggttcggatggttcggcttcaatgtcggcagcgccctcacgcttgacagtatcgcgatgtttgccttcattaacacaaacaccgcggctgcagccggaattatcggctggattttaatcgaatggatgctgaataaaaaaccgaccatgctgggcgctgtatcgggcgcaatcgcagggcttgtcgccattacgccggctgccgggttcgttacgccgttctcttccatcgtaatcggtttcatcggcgggcttgtctgcttttggggcgtttattggctcaaaaagactttcggttatgatgatgcgcttgacgctttcggcctgcatgggatcggcgggacatggggcggcatcgcgaccggtttattcgcaaccacttccgtcaatgacggcggggcaaacgggctgttttacggcgatccgggactgctctggaagcagattgcggccattgcggcaacctatgtatttgtatttattgtcactttcgttatcattaaaattgtaggtctgttcattcccctgcgcgccagtgaagaagaagagtcacttgggcttgatttaacgatgcacggggaaaaagcatatcaggacttataaagtgaggagtggcttagatgagcggtcaaatgttcaaggtagaaatcgttacgcgtccggctaagtttgaaacattgaaacaggaactcggtaaaatcggagtcacatcgctgaccttctccaacgtacacggatgcggccttcaaaaagcccacaccgaactgtaccgcggagtcaaaattgagagcaatgtgtatgaacggctgaaagtggaaatcgttgtcagcaaggtccccgttgatcaagtggtggaaacggcgaaagaagtgctaaaaacgggagagcccggagacggcaaaatattcgtctatgaaatcggaaacacgattaatatccgcaccggagaagaaggaccaggagctttataaacaggcagaacgcccggagacagaaatgtcccgggcgttttttccagcttcattaaaaagaagaaacctttttttcatgcgggacaggccgcttatgccgtacgggttgttttttcgcatatgtactgatattgaccagtatgccgcacaaaaacagcgtcataattaatgaagaaccgccgtagctgataaacggaagcggcacacccgtaaccgggagaagtccgctcatcgctcccaaattcaatacaacctgaaacattaattgaaacgtaattccgatggcaagaagcttcccgaacgggtcatcagcccgcacggccgtttttacgccgagaagcattaacgcaaaatacaatcccaaaacgatcagaacaccgaatatccccagctcttcgctgatcacggccataatgaaatcggtatgcgcctcaggcagatagttcattttttcaacactgtttccaagccctcttccgaaaaatccgcctccggaaatagcaaaataggattgaatcagctgatagccgtccccgttcgcgtcaccaaacggattggtaaaggaaacgaggcgcttcacacgataggaggcggaaaatgcgagataaacaaccccggacaccgccgtcgcgccgagcacgaacagatggcgctttttcaagccggcacataataaaatcgacccgcacgccgccaggattaaggaagccgtccctaaatcaggctccgccaatgtcagcagaaaagcagttcccaaaatcactaaaggcggcagaacccctttcacaaattgatgaatgtacggctgctttttcgtataaatcgaagcgaaatacaaaatcatcgcgatcttcgccaattcagacggctgtacgacaagcgggcccgctcccagccacctgcgggaaaaattccgctccagcccgattcccggtatcaagacgagcagcagcaataccagcgaaccgaccacaaacagcggtacaagccgcgcataccgcttatacggcagacaggcggcaaatagaaataagcataatccgatcagtaaagaggtactttgtttatggaagaaataggatggatctccataccgctgagaccccatcacatcactggcgctgtacaccattaacaagccgaatccgcaaagcagtataatgacaaacacaagcggcagatcggcgtttttcaaacgtttcagcaacggacaaaactccttcggctattcttttcccgcatacttgacgcacagtaatacagtcacgtttcattctgtttacttttttatgattatttttaataccaattgtgtctcatagaaaaaagcattacactgttcatataaaataaagataaaaggtgatatttgtgaattacgaactatttaaagcgatcaatggtttgtcgcaccatagtgccattctcgactctatcatggtatttattacggaatacgccatttacgcctacgcccttttcctgcttgccatgtggctgttcggaagcacaaaaggcagacaaaacgccctgtacgcgggcttcacgggtgttgcggcgcttatcgtcaactacctcatcacgaaggtctatatcgagccgcgcccctttgtcgaacatacggttcatacgctgatccctcatgccgcggatgcttcatttccgagtgaccatacgacaggcgctttggcgatttcaattgcgattctgttccgcaacaaaaaactcggctggccgcttgtgattttcggccttttgaccggcttctcaagaatttgggtcggccaccattatccgatcgatgtgctcggaagcattatcgtttccctcattgtcggattcctgctgttcagattttcaaatgtgcttcgtccgattgtcgatctgatcgtgcgaatctatgaaagtatcgttcataaaagcaaatcgacaaaccataatatataaaaaaaagccggcgtctgtcacagactgccggtttttgtatgtttggctgtatgctttttcctttgtaaagcacagaatgcggcaatgccgagactgtcaatcagcacatcgcggaggcatccgtttctgccgaaaaagagctggacgatttctgtcaggaaagcggcggccaatgcatacagcaccgccctcttcatgcgcctgcgctctctgaaaaacaaataggcgagcacaaaaaatgaaaacgcgtgcccgagcttttgaatcgccgcttccggtatggcgagctccgccatatcgaacacaaagaaaccggacacatccggatgcggcgtgaaacgaaaggacaccgtctgcgacacaaccatatcgtgaaagctttcagtcaaagcagaaacgaaaacaaagacgagccacccggccgccagacatttattcattcagcatctccttcgttttctactagtataaaggcacatgcgggaatatgaaaagcgcctatctgagctgataggcgcttcgggatcaagattacttgcccgaatctttcattgagccgtcatctttaccatctgtcttgtcttttgtgccgtcctctttgtcacctggtttttcttcggtttcttttttaggcgtcacatcttttttctcagaagactgctgaattgacccttccgtttcttctgtcacagcgtttttctcttcagccgccgctttttcaatagatgttaccggcttgtccataaaattgagcgggttcatcgctacgccgtccttgcggatttcaaagtgcacgtgatttccgctttcttcactgtaaaggttttttccggatttaccgatgacctggttctgctttactttgtcgccctgatccacgctgacttcagataaagactgatagacagtagacaggccgtctgagtgttcaatttcaaccacatatcccagtaccgggtctttagcagctttaacaaccgtaccgctcagagaagcagaaacatcaaatgattttccgtctttctcagctaagtcaattcctttactgaggctgtacgtgttattatagttaacaagtgctgcttctttctctttttttgcggcatcagtttcataaaactttttcacaacagaaacattttcagaatgagcagccggcattgcgacgttttccattgacttgcctacttcgacggcatcgtctttgccgctgtcatacgcagagtttccgccgttgttcgtcagattgtccttcacatcattcgaaacggattgataccaaaggacagctgttaaaatgacggccgcactgactaagtagattgcagggaatatccagcgtttgcgaaaaaaccgctgaagttttttgacttgagaagttttcttttcttcctctctcatttgttcatcacctcagcaacattctgaacacttttctgaaaatatatacacatccataaaaaacttttttggaaatagtatgtgcagattgcacttgattatgtaataaaatgtgaagggagatcccggaatatgaatttgaccctgcgcaaagccctattggaggatttagatgcggtggtggccatatacaactcgacgattgcctcacgaatggtaacggctgatacggaagaagtgacgcccgaagaccggatggattggtttttgcggcacacggaccggcgcccgctgatggtcgcggaagatgaaaccggcaaagtggcggcctggatcagctttgaaacgttttacggccgtccggcctatgacaaaacggcggagatcagcatctatctgcatcaggattgccgcggcaaaggagcaggaagctttctgctgaaagaagccctggcactcgctccggcaatcggcatccgcagcctgatggcttttatcttcggacataatgtgccgagcattaagctgtttgaaaaattcggttttaccgaatggggcgtattcccgggtatcgccgaaatggacggaaaacgatatgacttgaacattttagggagagaactgtcatgatcaccatcgataaagagaaagacgaaaaccagccgctcaataaaaaagcccgttcccttgccgacatcgccaaatggggaaagatcaccgccgtgtttctgatcatcacaggctctctttccgctctgtcagccattgtgacgctgctcggagccattccgggggttctgctcatcatttccggcgtcatgctgatgcgctcggcaaaagcggctgtcgcacttcaggaaggactagaagaaaacgcggaagaaaatatgcttgcacattacgcgtcatttatcaaaatgcagtttttttacgcggcatccagtgtggtattgggcattctcgcttttattttagtcgtcatcttcgctgtcatcggaattatcgcttatcacagcactgatacgtatgacacgcctgattcatattactatgagaacgacccggtgtttgaatgacaaaaagagctgatcgcgcgtcagctcttttttaataaagcatttcttttttccggtcttcttccgttaaaaattcaataaagctcttcatcgcagacggctcctcggcaatcagccgggtataggcgcttttccgttcctcggacagaatatcgctttttctgattctgttcagcatataaaggcggatcgttttttgcacctgtttccgctgatagccggcttccttaaaaaacgcaagacccagagccgcaaggagggcaaaaatgccggccgatacgagagctcctctcccggaaggggcctgaatcaaaagcgatgccagatgaaacagactaaaagcggcgagcgggaaagcaagaaaacggtaaatgatgctttttttcatcagcggcgcgatggcgatttgtattttctgaatttctttttttatgaatcccggcaattgttccgcatgctccagcttcatgccctctcccctttgctgtcatttttgtcttctttttcatatatgcatattttaccgcacccggaactttctttgaaagaaaactgcattcatctttgattccggctctttattctttcaaaatgtcaatgttataatttgaaatgggaatcagattgctgcacttgtcggaatactaatgggcacagtcttgataaatatgatatagcggggttgcaaagtgagcatttcatttattttattcggattttttttcgttttaaatatacttttggccgtcatcatgattttcaaagaaagacgcgatgccagcgcttcatgggcttggctcttggttcttttttttattcccattttagggtttattttatacctgttattcggccataacctgagacgcaagcatctgtttcagtgggaagaccgtaaaaaaatcgggattgaaaagctgctgaagtctcagctgaaggatctgaagtcgaggcaattccaatttaacaacagggcgactgtggataataaagacctcatctatatgcttgtcatgaacaaccacgcagtctttacagaggataattcggtggagattttgacggacgggcgcgataagttcaaacgcttaatgaaggacatttccaacgcaaaagatcacattcaccttcaatactatatttataaaggtgatgaactgggaaaaaaattgcgcgatgccttagtgaaaaaagcacgcgaaggcgtaaaagtcagagtgttatatgatgaactcggttcaagatcactcagaaaaaaattcttcaaaccgctgcgggacgccggcggccatgtggaagtcttttttccttccaggcttcgtccgattaatttgcggctcaattaccggaatcaccgcaagctcgtcatcattgacggcgaaaccggctatgtcggcggctttaacgtcggagatgaatatctcggcctgaatccgaaattcggctactggcgcgatacgcacctcaggcttcaaggcacggcggtacacgccattcagacacggtttatcctcgattggaaccaagcctcccatcatcatacgctcacatacgttccgaatcattttccggaatgcgagccgaagggcaatgtcgggatgcagattgtcacgagcggaccggactcagaatgggaacaaattaaaaacggctatatcaagatgatctcaacggccaaacggtcaatcctgattcagacgccttactttattcctgactcaagtcttttagatgccctcaggatcgcctgtctgtcaggcatcgacgtcaaaatcatgattccgaacaagccggatcacgctttcgtttactgggcgactttatcttacatcggcgatcttttgaaagccggagcctcagtctacatttacgataacggctttattcatgcaaaaacgattgtcgtcgatgatgagacggcttcagtcggtacggcgaatatcgacgtcagaagcttcagacttaattttgaagtcaacgcctttatttatgacgtcaccattgcgaaaaaactcatttcctcatttaaagaagatctgctcgtctccagaaaatatacgtatgaagaatatcaggagcgttcgctgcggatccgcattaaagaatcgatttcaagacttctttcgccgattttgtaattcccggggtgtttctcgggaattttctgatacaaaaacggacacggcatgaaaaaacacattttatattcaaaagaatgaccgaatagtgtataaatgaaaagtgagtatttttttgtaaaggagtgccatagtttgaaacctgaatcagtgaatcgttcgcttatttctatttcgaaatggggaaaagcgacaggtattttatttattatcgtgggtgcgtttgcggcgctgtcgggcgcgtttttctttttaatcggagccattcccggcgttctgcagatcattgccggcatttttctgatgcgctcggcaaatgaagcgggacagatggcggagcagttcaatgaactgacagaggaacatatgctggagaattatgcaaagttcgtgaaaatgcaggggatctacctgattgtgacggtcggcttgtccgttctcggtattgttctcttcattgtcctcatgacgctcggcatcgtggacggcgtgtttaataatattgatgccaatacatattaaaaaggaaaatcccggcgcatccgcccgggattttttcttattccgcttcttcgacaacgggaaagtttttctgctctggatttgccaatacggcgatggcataatagcgcagctgagacgctgtctgcagatattctttcagacattccggcttcagccagacgtgtcgccgtcacatcaaaaaaacttttcctcagagtttcaattgaaatcactcaattgttcgactgttcctgatcaggtttagaagcaagaattgtgattctgcaaaataaggataaaagccctgatggaacaagatcacttatcatacagttttttgggtctttgtaattaaattacaattgttcttaatattcactcatgtattcatgctattatattgaaaggaacgatcaaaagcgttggcgttcgttaaatatttacgagtgctcctcatgtcaaagtcagaaaaaatagtataggaggtaacatatgtttaagtttaaaaagaaattcttagttggattaacggctgctttcatgagtatcagcatgttttcggcaaccgcctctgcagctggcacagattactggcaaaattggactgatgggggcggaacagtcaacgctgtcaatggatctggcgggaattacagtgttaattggtctaataccggaaatttcgttgttggtaaaggctggactacaggctcgccatttagaacaataaactataatgccggagtctgggcgccgaatggcaatggatatttgactttatatggctggacgagagcacctctcatcgaatattatgtagtggattcatggggtacttacagacctaccggaacgtataaaggtactgtaaagagtgatggaggtacatatgacatatatacaacgacacgttataacgcaccttccattgatggcgataacactacttttacgcagtactggagtgtccgccagtcgaagagaccgacaggaagcaacgctgcaatcactttcagcaatcatgttaacgcatggaagagccatggaatgaatctgggcagtaattgggcttatcaagtcttagcgacagaaggatataaaagcagcggaagttctaatgtaacagtgtggtaacagctcatctttaatgaggggcagctaacgggctgctgatcgttccttgagaaattttataatgattgtgaagaggcgaacggttttggcattaccggaggcaggatattctccatcagtttttttagcgcgtattaaaataagagttccgtctttttttggtaacccgcttacaacagacaccttcacataagccttaagcaaaataaaaatatcccggttaccacctcctttagtttcggaggatttcttcattaaacagatcgcaatcccgcatccaggcttgtctgaatatagagccaaaaccgtgatttcctcattatccattgtaaccatttccgttacacctctagcggcatgaacccatctctttttaacaaaagagatgattcattacatcataaagggacttgctcgcaagttcattctccattgcccgctgtacgcttccgaacgtctcatcgagcgcgcgctgaatatttttgccgaccggacagtcggggttcggattgtcgtgaaccgcaaaaagctcttccttattctgcaccgccctgtaaacctctaagagggtgatctccgacggatcttttttcaggctggctcccggaacacccgctcgggatgtcagaatacccgcttttttcagctggctgatcgttctccgcacgacgacgggattggtgtttacgctacccgcaatcatatccgatgacgcccgttcatccgttgagatcagcgatagaatgtgaatggccacagcaagacggctgttaatcatgtttttcaccaccgttgtaaccacaatagttacatttcatttgtttgtcaactactaatatacactaaaacgggcggcaggatgaaatcaagttggcaatagaagtgtaaacaggccggcgggaaaccggccggagagggattaaaataagaaataacgctgtccgagcggaacatagctgacgggctggcatgccagctcttctccgtcggcgaacacctgataggttttcggatcgacttgtatattcggcatcgcgtcattcagcttcatgtcgagcttactcagcttacggatattccgtacgggagaaatcattttttcaaggccgagcttttccggcacaccgtttgcgataccggcctgggacataaatgtaatagaggtatttcggtttgctttaccgtatgatgcgtacatctgccgcataaacacgggctcaggcgtcggaatggaagcattcggatctcccatctgggcgcgggcgatcatgccgcctttgagcacaagttcaggtttgacgccgaagaaaaccgggtcccatagtacaaggtcggcgagctttcctttttcaacggaaccgacttcatggctcaggccgtgagtgacggccgggttgatcgtgtatttggcgatatagcgtttggcgcgcacattgtcattgccgttttctcctgatagagcgccgcgctgttttttcattttatcggcaacctgccatgtccggataatcacttctcccaccctgcccatcgcctgcgagtcagacgacgtcatgctgatcgcgccgatatcgtgcagaatatcctccgccgcaatggtggccgctctgatgcgtgaatgactgaacgccacgtcttcaggcacttttgaatctaaatgatggcagaccatcatcatatcaagatgctcgtccatcgtgttgacggtatacgggatcgtcggcgtcgtagaggacggcaggatattggcgtaagatgcgagtttcataatatccggtgcgtggcctccgccggctccctctatgtgatatgtatggataacccggtcgccgatcgcatcaagcgtattttctaaaaagcccgcttcattaatcgtgtctgtgtggatcgccacctgaatgtccgcctcatccgctgcttccatgcaagctttaatggcgcttggcgttgatccccaatcttcatgcagcttcaggccgatcgcgcctgcttccacctgctcgatcagcggcgctttatcggatgcattcccttttcctaagaaaccgacgttgatcggaaactcctcggccgcttccagcattctcgacatgtaccatgcaccggatgtacaagtcgtcgctttacttcccgtcgcaggacccgttccgccgccgagaagcgtggtcacgcctgaagaaagcgcgacttccatctgttgcgggcagataaagtggatatgcgtatccaccccgccggccgttacgattttcccttcgccggaaataacttctgttccggcaccgataatcatgtgcgggtccaccccatccataatatcaggattgccgctttttccgacgccgacaatccggccgtccttcaccccgatatccgccttgacgattccggtataatccaggataaccgcgtttgtaatgaccagatcaagcgctccgtctttcccggtgatacgcccgttctgccccatgccgtcccggattgttttccctccgccgaaaatcatttcttcaccgtaattcgtgaaatctttttcgacttcaatccataaatccgtatctccgagtctgactttgtctcccgttgtcggtccgaacagttctgcgtattgctcacgtgacattttcatcggatcgcctcctccatccatccggcttttttaagatttgacagagtcttctcttttccccgctcatccatatacgtatcggccatgccgttgagacctctgaccgtttttcgccctccgatttccacgagcgtgacggttttctcttctcccggttcaaaacggacagatgtgcctgacgggatatcaaggcgcatgccgattgctttgtcccgattgaaggaaagggcgccgttggcttcggcaaaatgaaaatgcgatcctatctgcactgaccgtgttccgttattggtgactgacacctccagcgtcttccggccttcattaatggtgatgatcccctttgcgacttgaatcgctcccggcttcatgacttcacctccgctttgatcggctgatgaacggtgacaagcttaaccccgtccgggaacgtcgcttccacctgaatgctgtccagcatttccggaacgccttccataacatctttttccgtcaatacattgcggccggattccatcagctcagcaacgctttttccgtctctcgcgccttccatcagatagcaggtcaaatatgcggcggcttcgggataattcagcagaacgccgcgcgccttccgctgcttagcgagctctcccgccgtaaaaataagcaatttttcttgttcaaccggtgtcagtttcatctgtattcccccttagtgatagtcaaacacaatccgcatggtcataccgaaacgatgcaggcggccgtcacccccttcacctcatgaaatgttaagtgataaaagttattcgacggtgaacgacccgattccttttgcagaaattaccgatttctcatttttttcttcaacaaacgtttaatcaaatgtgaagaaaggttacattctatgtgaatattataaagaaatcgccgggtaatttatagaatatttaaaaatttagtgaatattaaccaaatgaactggaatttttgtcatttctcataacaaaaagcccaaaatattttgggcttttgctgtgtttcactatcaaattaatcatcactgagtttatctttcgttttgccgacacccttttgcaggctgcctttcgctttgtcttttttaccttccgcttttaagtcggacttgtttgccatgtcgcctgctttgtcctttgcttcccctttcattttgttcatgccgccttttactttgtcttttaaaccgttatcttcactcatgatctcttcagctccttttttgttctgtgtacttgttttcttccctttcagcccgaacacaaacatgtaaactctcaattattgatttcacagcgttccccgtagcggagcactttgtaaacagccaatccgtctgacagcttattatccccgtattgcacgggcagaagagcaaagaaaacataataagttgaaaaatagacaaattggtaaaaaaataagtttggctcaaggacatcttttatgatcagcagatttattaaaaagatagaagcgagattaaacagacagcctccggaatagacgagcgcgctcgtcaggcggttatctatccgcaattcgccgaacttgcagaaagaatctatgaagtagatacgccgaacctgaatcggccctacttttaaaagacgtttccccattccgatatccaatgacgccttgcctccgaacagcatggccataaagctgtgtcccgacacatggatgacagacaccatcgggagaatgatgagaaatgaaacgaaaaactttatcatatcattaaatccgaacaacaaatcactccttcccatcgtacttttttccctcttttgcgatttttccgattttttctatgatcaaacgtcctgatgtgcataaaaaaataaccatctgctgatcagatggttaagaaaattatatatcgtataaacactgttctttttgaatgttttctctcatgcgaatcgctttttcataaaaatacgccgcttctttatattgctcatgtgcgcttgtgtaaacggcggcctccaaggcgaaatcttcaatatacacatacagcgatttttcattcatatagtcaaacacttcatgaattaaatccatattgagagactccaaataaagcgcttgtaaaaacttatacttctctaaactgaatcggtcgccgcgttctttcgcgatcatgatccctctttcataataggtaagggccgcttggtcatcatgcagcctgaaaagggtgtgcgttaagctgaacagcgccttcggaagctgttcaagctgatgctcttcaaaaacgggaaccgcttttctaaagtaccgggccgcttcatccagatcccgcttttcagaataacaattccccagattgtaaagcgaagacccgatcaggcggggctgtccttcaagcaaagaaaggcggagggcttcgtctaaatgctcaagcgctttgtcgtagtttttgcagtcgatgtagtttcctgagatgacgaaatggcattgaattctccgcactctgtaaaaatcgtgtttcatatacgtatccagcgcctgaatcccgtgattcatggaaaaatgagtctgcttcatgacgtaaaacacttcagacatcttgaaatggaattccgccctctctatatcatcctcgacaaatgaaaggagtttttccgctttccggtaaaaagaaatagccgcaacatagttattgtgatcgaattcatacattcctctgaacaaatggaaataatactcagacagtcctgatatactgtccgtgctttcgatcgtcttttgcagctcgctgtactgaatctgtgattgttcggtgcattccggcttgacgtaatcaagcataatatgatggcggtagctgatcagctgataatataacagcagcagctggtcttcctccatacgttgtatatcctcatcaatttcctctttcagctttatggcatcagccgcttgaaacgctaaaatgtgcttgtaccatttgttgatcttgactccaacttgagatgacggaatctcgtatgcggtcatgcccctttcacaaccttttctaatttctattggttatattttaacatattgtatggctttggaattgcataacttgattgtcctgcatcaaaattcctatcatatatttcggctgttaccggtattttttgaacagaccgctctcataatgtgaataaaaaagcctgcccttgtccgggcaagcttttcttcatccgcctatataagacatttccactttctttttcccatccgttttagaaagcgcgcggtcaattgaatactgatccgtgcgatttctccagacagaagcgatggattccgtcaattcatcatcggtcagaccgccgcgcacgagtttccgaacatcatagccgcttgacgcaaacaggcacgtaaacagctcgcctctcgccgacaggcgcgctctgttgcaggaggcgcagaatgcatccgatacggaggaaattacgccgatttcgccggaaccgtcaagatagcggaacctggaagcgacctctcctttataattcgcttctatcggctccgtcggcatgtgctggttgatcagatcaataatctcggccttcgtgatcacgtcttttttattccattgattcgtattgccgacatccataaattcaataaaccggagaatatgacccttttctttaaaatagcgggccatcggcaggatatctttttcattgacgcccttttgaacaaccatgttgattttcacaccgagtccggccgattttgccgcctcaatgccctcaagcaccttgttcaccgaaaccccgcggccgttaatggccttaaaccgctcatcctctaaagaatcgaggctgactgtcacgcgatgcagccccgcctgcttcagtttttccgcatacacgggaagcagagagccgtttgtcgtcatcgcgatatctttaagtccggggatgcgcgcaagttttttgatcaattcaggcatatcttttctcatgagcggctctccgcccgtcagcctgattttttcaacgccgaagcggccgacaaacagcttcgcaagccgctcaagctcctcgaaggagagcaattccgtcttttgtaaaaatggataatccggtccgaataattcggctggcatacagtacgtgcatctgaagttgcagcggtcggttacagagatacgaagatccctgagcggcctttcccttttgtctgtcacccggcgcgtttctgtattcataagcccaagacccctttctattgttcaacccgttcaggatgtgtgtatacgttaaatgatccgtttctgacaaaacctatcgcggttatgttcagctcttccgccatttgcagcgcgagctccgtcggcgccgattttgaaatgacaatcgacacgccgatttttgcggcttttaataaaacctctgaggaaatccggccgctgaagacgatcagcttgtcacggaccggcattccgtttttcaaacagcagccgtacagcttatccagcgcgttgtggcgcccgatgtccgtcctcatgaagagcagcttttccgtatcgcacagcgccgcattatggacgccgcccgtttcccggaaggtgccgctcccgctttgcatctccttcatcaggcgaaggcacgtctcaggagttatggtgatacggctgacggcggtttttgccgttttcacatcctgctgaaagtaaaaatggcggcctttcccgcagcatgaaccgatgactctcttcgtatagtctttttgctcaagcactccgggattcgtcagttcaacatatgcaaacccgagactttcatctatagtaaagcttttgatttctttttcaaaacgaatgacgccttctgatgcgagaaatccgatgacgagttcctctaaatggtcaggcgtgcagacgagcgtaacaaattcctgcccgttcaccatgacggtcagcggatactctgaaaccatccgatctgccgtctttgttaatacccctttttcatagcggtatatgtctcttaccgctgttgttttttcatccactgttttcccctccgcagtatccttctcttttattcttccacaatccctgtattttgtcgaatttgcggtttaaaaaaagagccctcttaggactctatgtttcattgcgatgatgtctgctcagaatggtgaataaaataactgcggcgataatggccaatatactgacgaatatgaaggcggcaagcttcagaaaaattcccatcagaacaaaaacgactgccgccagcactaatataatgcctgctccttttaacaacagcgttcatctccttttatccgtatcattcccgcggttccgttttctaaacaaaaaagacgccgcgcgggcgtccttttttaacctattcttttgctaaatcctttgcagcgtcttcccaagcctgtttgaactcgtccgcgctgtcagctgagacatatgtgccgcctccagcttccgccgctttttcaaggctttcgcttcctttcatgccgaagttgaagccgatgatattgacgatcgtgttgacgttcgctttacggagcttttgaatttcggcctgaggattacctccgcatgtttcttcaccgtctgtgatcagatatacgacgtttttccccgcggcgccggcccgctcaaattcttcacgcgtatcagaaagcgctttcgcaatcggtgtccagccggtcggtttaatcttgctgagtgattgctcaaatggagtcacggcgtacggctgaaggccgtataacgtttctgtcgcattacatgatacggctttgcctgagtttttattattgcccttatgcccgaatacccgaagcatcagattcgtgtcttcaggaagaacttccgcaaaagaagtgacagactctttcgcgacatctattttacgctctccccctgttttttgtatcatgcttccgcttgcatcaaacagcacagcaacgtttgtttcttcgtgctttttctcagctgcaaaaacaggtgatccgagtgaaagcgtcaaaagtccgacaatccccgcagtgaacatttttttcatttccttcattcctctccgtttgtttttggccgatgggcccccggctcttctctatgctagatgacgagtatgcaaaaagatatagggcgggattccttttgtataagcggctgtacgccgttaaaaatgaacagaattatgcgcatcatcctaaaaagattggataaatgatgacagatttaatgcctttttcgccctttttgtaatataagtccggaatctgatgctttttacagttttctcttcatcttttcttgaaatttttgttaaataaaaataaaaaaaagggccgataaacggcaccttttcttattccgctaatgaactcgctgccattgtaaagatgcggttcatatccttttggctgtgagcttcgtaatattttcctccgcccgctttggcaatctcgtgaagctggccgttgaagccttccttaaagtcaaagccgatcacgttaactttaatatgctgtttgcgaagttctttcgctgtcttaacaggatctcctccgcatgtctcctcgccgtccgtcaacaggaaaacggatttactgccaagtttgtgcaaaccggtaaaggaagccttcgcatcctttaatgcttttgcaatcggtgtccagcccgtaggcccgattccgttaagagagttaaggaagctctgtctgtcaaacctttggaatccatacacaccgcgaatggattcacaagattgaacctttccggagtttttattgttgccttccgaaccgaaaaccgtcattctgacctgtgatttagatttaatttgatccgcaaaacggacaatttcttcttttgccatgttgtatttagaaacaccgtcaatccgttttgccatactgccgctcgcatcaagtaaaatggcggtattgtttttaaatgaaagagtcttctcgtttgcattctcggcagcaaaagcaggagatgcagcagtcagcatcaatccgagcatgagtatgagtgaaaatgtttttttcattgctttttccccttttcaatagatttacgttcaacgccgaacaatatttatcgtaaatgagatgaaaagggaaataaataggacggcgttcctcattatttttgcgtatattcacatagaagcggcatttttatcagtgatttacacccggcgctcagccttcaatcgacatttgtcagcctttaggctttcgttatatgagtctgttggttgctttaccgtttatggaatagttttcaaaaaaacagacgctcatgaaagcgtctattttttcgccatatatttgtttaaaaatgaatctgcttcggaaatgtccactccctgataataatgcttgacgatgtccgccactgattttccctgctccgccatgtaattggccccgtactggctcatgccgacgccgtggccgaatccttttgtcgtaatggtgatgctgccgccgtttcgtttccattcaaagtcggcagaacggagtccgagtttttcccggatgtctcttcccttcagctttttgccgttgatgacggccgttgccacttgatggcccggcgttctggctgtaatctgtcccaccgtgttttgtcccgagagctgtacgccgagcttttgctgaaactccggcacactgaaggtctgggtggcgagatatttcggcgattgcttatcccacggacttttcacgctttttaaataaggaatggcgcttgtccaataggcttccgcattttctgtatacccgttgctcgtagagaagaaagatgcctcaatcggcttgttatcgtatgttaaaatctttccttgcgtgccggccaccgcgtttgtgattttcttgaggttgtgtgcgtacttagaaccccattcttttttcagctggcttttgctttgatagacttggaacatttgcgtatcatccaccagtgatcctttcggcgcctgaacggctgagtcagcgaccatcagtctgacgatgaatgtacgggcggcgagcgcctgggcttttaaggcctccggtttaaagtttgcgggcatttcggaagccacgacaccgatcacgtactcttcaagcggaatgttttctacagattgattggatgtccgataaaccggaatggatacaggtgattctttcaatgtttctgctccttttgtttctcgtgtggtgtgtgctgttttgtgtccgggctctctgtttacggctgctcctttttctgcctgaaacggaaggacgagaatggtggggacaagaagaataagtatacacagcccggatagtagaaatacaatcggtttcatatatcagctgcctcctgcttgggattcgactctacttcatcttatgggcagggacaagctaatatgacttccttttggacagaatctttattccatttttcacgcgaaaaacgtattcttttttggaaatcagagcataataatgatgataaaccataaaaaaacagtatgccagattgacatactgtttttacagccattatgcgtttaggtcagttacgacttctttgctttcttgttcagcggccgtttcatcaacgacacgctcgatatcagcgccgagagccgcaagtttttgatggaaattcacataaccgcgatccaagtgcttcagttccgtgacgcgtgtatgaccttcagccactaatcccgcaagaatcagcgccgcgcccgcacgcaggtccgtagcggcaacttctgcgccttgcagctgtacaggaccgttaataatcacagaacgtccttcaattttaatgtcgccattcatccggcggaattcttcagcatgcataaaacggttttcaaacacagtttcagtaatcatgcttgttccgctcgcacggagaagcagcgccatcatttgcgactgcatgtcagtcgggaatcctgggtgaggcatcgttttaatgtcgatcggcttcagctgggcaggaccgatgacacgaaggccttctccttcatccgtaattttgactcccatttcttccatcttcgcaattaaagacgtaagatgctcaggaaccgcacctttgactaatacatttccttccgtgatagccgcagccaccatgaaagtacccgcttcaatacggtcaggaatgatgttgtgtcttacgccgtgaagcttctcgacaccttcaattttaatggtgcctgtgccggctccgcggatttttccgcccatcgcattgatatagttcgctaagtcaacgatttcaggctcttttgccacgttttcaagcgttgttgttccttcagctaaagcagctgccataatcaagttttctgtcgcacccacacttgggaaatctaaatagatttttgcgccctgcagacggccttccacttctgcttcaataaagccgttgcctactttgatttttgcacccattgcttcaaagccttttaaatgctgatcaatcggtcttgagccgattgcacagccgcccggaagcgctactcttgaatgacccgtacgggctaacagagggcccataacaagcactgacgcgcgcattttgcgcacatattcaaaaggtgcttctgtttctaaagcgtaagaagcgtttacggtaacttcattattctcaaaatgcacatctgctcctaaatgacgcaacacttcattaattgtatatacatcggagagcgtaggtacatcacatattacgcttttttcttcacttgctaataaagatgcagcgataactggtaaaacggcattttttgctccttcaactttcactgtgccgtttaacttctgaccgccgcggacgatgattttttccaaggtattcccctccgcgtccctatattctctatattaatattcagtcgtcacgattggtgtgccaaccgtaacggtatgtttttcgcccattcccgcacttctaagcgcaacttgcacattcatcttatgtttcgatgtcatgatgtaatctgtccacttatatgtaaatgcagaaacagaaacgaaatgaggctcaactacatgttcaactggacttgcttcaaattctttcatgagctgttctgcttttttttgcaaaacaatactcatattatcatttaaatgaccctttagacaagtaaaaataaatactttattttgaaatatgtcatgtgcctgccgttcaaactgttcatatgtatcattccagttttccggttgctccgggctcatttgctcatataataaatacgaagttgggttctggtttttgagggtagtgacgagctgcagtttaaaagttgtgtgattttttttatcagaatacgtgccgacggcctttacgattttatcttcccgcgcagttttccagtgatattgcggatactgcgtcttcagttgttttaccttgtcatcaaattcactcagtgacaggttcagattttctttcgcatgaagcgtccattcatctacagtgacctgctgccgctccattccttcggcaatctgggcaagcggagacagctcacttgcatgaatggaatgaaataccgctattaaggcgcttaaaaaaacaaaaaataagatgatgcggcctgctctttttttcttcatatcgatctctcccccttactcccatttttgccggagccggggaaagcaatacatggaaaacttcgtcaaaactcgccaagcgggtgaagaaaagttggtttctcacccagcgattcccttcatttcaacagacgaaacatcctaaaataagtatggaagctgtttcgaataggtaagataatctaaaaagaagtcagcgactgccgtaccgatcgcaatggtaagaagaatgatcagcagcctcgcctgcactatttttccttttcggatcagcggatcaaagttgacggcctgaagcgcccaccatgtcaccgcaatgcataccaggtgaaccaggatgctgattgcggcctgctgccccaatacattcacaaattccatctcctttcattttttccgcccctcatatcctctcttattatataagaagaagagagaaagatgatcatttttacatcagaatttttatccaaaattaggggcaatccccgcttaaatgtccgttctccggcatgatatacttttttggaaaggagatgggaatatgaatcattccttttttcatccggaaaagcagtatggagaaacacttcccgtatttgaccacgagtgggaagcgatagcattctactatgattatagacagtctcaaacagaggaactgaaagaattatgtcagtttttcaacatttctcttgattattcacgcggcagcctgctggaagtggaagctctttacttccgcagcatacaagagctgcttttggcggattggaacctgccgattgacgaatttgagaaaatgctcagcgtgtatgtcatcgattgtgccatcagacaccatgacgatgccgaatgggtcgtcaaaccttatccgtatacggacggcgcttatacgacgggtgtgcggagaggaaacaaaacgtggcacaccgacaactgctgcgaacatttatatctgcaaaaagaagaggatcatccgcttatcggcgtctatgaatctcttatgcgttaatatagaaaaagaatccttctcagacagccgagaaggattcttttttagtttcctgcaacatccaatctgtttacagcccgctgtagcgcaagctcagcccgacgaatgtcagtatcatctgatcgtttgttcaaacggtcttccgcccgctttttcgcagcaagggcgcgctctttatcaatgctttccgctgtttcagcggcttgtgcaaggatagtgacctgatcaggacggacttctaaaaatccgccgctgacagccgccaattcggtctgtccgtcttttttaaggcggacagcgccgattttaagcggagccacggtcggaatatggccaggcaagataccgagatcaccgctctcggctcttacacttaccatttcaatatcagcatcatatactgggccgtcgggagtaacgatattgactttaacggtcttcatgcttttaccctcctaggaccagattaaacttctacacccatctcttttgcattctcaatgacttcttcaatgcgtcccacaagacggaatgcatcttccggaagatggtcatatttaccggaaaggatttctttaaagcctcgtaccgtttctttaacaggcacgtaagaacccttttgtcccgtaaactgctcagctacgtggaagttttgagaaaggaagaactggatacggcgtgcgcggtgaacgacaagcttgtcttcttcacctaattcgtccataccgagaatcgcgataatatcctgaagttctttgtaacgctgaagcgttgactggacttcacgcgccaccgcataatgctcttctccgacaatttccggagcaagcgcgcgggaagtggaagccagcggatcaaccgcagggtagatacccatttcagttaatttacgctcaaggttagtcgtcgcatccaagtgagcgaacgttgtcgccggagccgggtcagtgtagtcatcggcaggcacgtagatcgcctggatagatgtaactgaaccaacgtttgtagacgtaatacgctcttgaagctgacccatttctgtcgcaagcgtcggctgataaccaaccgcagaaggcatacggccgagaagcgcggaaacctctgaacccgcttgtgtgaaacggaaaatgttatcgataaagaacagtacgtcctgtccttgtttatcacggaaatgctcagccattgtaagacccgtcaatgctacacgcatacgtgcgcccggcggctcgttcatttgtccgaagaccatggctgttttcttgataacgcctgaatcgctcatttcgtagaaaaggtcgttcccttcacgagtacgctctcctacaccggcgaatacggaaataccgccgtgctcttgcgcgatgttgttgattaattcctggattaatacggttttacctacgccggcgccgccgaacaagccgattttaccgcccttgatgtaaggagcgagcaggtcaacaaccttaattcccgtttcaagaatttcaacctcagttgaaagctcatcgaatgaaggagctgatctgtggatcgggtccttttgagcatccgcaggcagcggttcatttaaatcaattttatctcccagtacgttaaatacgcgtccgagagtcacatcaccgacaggaacggaaattggcgcacctgtatcaacagcttccattccgcgctgaattccgtccgtagatgccatggcaattgtacggactgtatcatcgcctaaatgaagagcaacctctagcgttaggtcgatgcctacttcattttcgcctgtagctggctgtgaaactttaatcgcattataaatcgcaggcaagtggccgtcctcgaaacgtacgtcgacaaccggtccaagcacctgacttacgcgtcctttcttcatcgctatccctcctgacaaaatctttctattctaaagcggctgcaccgccgacaatttcggtaatttcttgtgtaatcgccgcttgacgcgcgcggttatatgaaagcgaaagtgaatcaatgagttctttcgcattatcagtcgcatttttcattgctgtcattctcgcagcgtgttcacttgctttactgtcaagaagcgcgccgtaaattaagctttccgcatattgaggaagcagcacttcgagcacctcttcttcatccggttcgaactcgtaagaagccgtgcgcttcccgccgctcgttccgaaatccgttaaaggcagcacttttttctccgtcacttcctgtgaaatcgcactgacgaaatggttatacaccaaatgcagttcatcaaaagcgccgtcgataaacatttgaaccgtctgacgggtcaaatctttaatctgagcaaaagtgacctcgtcgccaagccccactaactcagacaaaatcggcatttcccgttttttgaagaaatcgcggccgactctgccgattgcaatcaccgtgtattcatctttagactgatggcgttcttgaatggtgcggtaagcgtttcgcaaaaccgaactgttaaacgcacccgcaagcccgcggtcagacgtaatgacgagatacgccgtctttttcacttctcttgagacaagcatcgggtgtttcgcgtttttcgcaccttttccgacgttaaacacaacctcctggatcttatccatatacggagcaaatgactttgcgttggtttccgcacggttcagcttcgcagcggataccatctgcatggcttttgtaatctggcttgtttttttcgttgacgtgatccttgacttaatatcgcgtaatgaggccaaagatttcaccacctttattcttcatttgcgtaaaaagagagaaaaagagaacctttttctctcatcttctaagggttagttgcttggtgcaaatgtgcgtttgaagccttcgattgcagctttgaagtcttcatcagcaggaaggtttcctgttttcgcaatgccgtcaagcagatctttatggttttgatcaaggtacatgtagtactcttcttcaaaacgtctgatatccgcaaccggaatatcatcaagatatccttttgtcagcgcataaagaatggctacctgtttttcaaccggaagcggtttattcaagtcttgcttcagcacttcaactgtacgcgcaccgcggttcagtttcgcctgagtcgcctggtcaagatcagatccgaattgggcgaacgcttcaagttcacggtatgaagccaggtcaagacgcaatgttcccgctacctttttcatcgctttgatttgggctgatccgccgacacgggaaacggataatccggcattgatcgcaggacgcacgcctgagaagaataggtcagattgaaggaaaatctgtccgtcagtaatggaaatgacgtttgtcgggatataagcggagatatctcctgcttgtgtttcgacgaacggcagcgccgtaattgatcctgcaccttttgcgtcactcagcttggctgcgcgctcaagcagacgggagtgaagatagaatacatccccagggaatgcttcacggcccggcggacggcgaagaagcaatgacagctcacggtaagcggccgcttgtttggataaatcatcatatacgacgagaacgtgcttgccgttgtacatgaattcttcacccattgtcacccctgcatacggtgcaaggtacagaagcggagccggctgtgaagcggacgccgtcacgacaatcgtgtaatcaagcgcgccatgcttacgaagtgtttccactacgccgcgcactgtagattctttctggccgatcgctacgtacacacagatcatgtcttgatctttttggtttaagattgtatcaatcgcaacagatgttttacctgtctgacggtcaccgataatcagctcacgctgtccgcggccgatcggaattaacgcgtcgatcgctttgatacccgtttgaagcggctcatgtaccgatttacggtccattacgcctggagcctggctttcgatcggacgtgttttgcttgtcagaatcggacccagtccgtctaccggctgtccgagcgggttgacgatacgtccgattaattcttcacctacaggaacttccatgatgcggcccgttcttttgacctcatcaccttcacggatatctctgtaaggtcctaagataacgatacctacgttggattcttcaaggttttgagccatacccaaaacgccgtttgaaaactcaacaagttcaccggccatacaattgtcaaggccgtgcacacgcgcaataccgtctccgacttggatgactgtacctacgtcatgaacttcaatttcagattggtaattttgaatttgctgctttatcagcgtgctaatctcttcagctttgatgctcacttaggtttcaccccttctatcgatttcctccggcaagttgacgttccatgcgctcaagctttccgcttacgcttccgtcataaatccggtttccaatgcggactttaatgccgcctattaaatccgtctgcacttcatttctgattctgagcgaagcgattccggctttttttgcaaacacttgagacaatgataacatttccgcttctgacagcggttttactgaataaacaaccgcgtcctctgtctgacgggcctgattggcaagtttgataaactcgtctgtgagatcaggcacaatcgaagaccggcagcggtcaatcagaagaaaaatcgtatgcagcacagactcagacagtgcgccgaacgattgctgaatcagctcttttttcttagcggccgataccttcggatggcttaacacttcctgtaatccggcttcgttccgaaacacttcttttagtacggtaagctcttcttcgatttcattgatttgagaagtctcaacggcaatgtcgaaaagcgctgacgcgtatcgtttagagacagcagatccactcatcggctttctcctacctctttaagatagtcctgaatcagttgttcctgggcttgttcatcaagctctttttcaatcactttcgatgcgattaagacagaaagtgatgcgacttgctcgcgaagtgcggaaaccgcttgttctttttctttgacaatttcggttctcgccgcttctttcaatctttcagactcggcgcgtgcagcctggataatgtcttccttctgcttttcacccagttttttcgcattttcaatgagtgattgtgattcctgtttcgcttcttttaaaagaacgcgctgctcttcaatcagcttctgcgcttctttatttctttcttcagcggacgtaatttcgccggcgatatgatcttcacgctgtttcattatatttaatagcggtccaagagcgaatttcttgagaagcgctaataaaactagcatagctaacaattggaataggatatctccgccgttaaacgacagtcctaattcaagaggtaattgagacatctactacggcaactcccttctgcaggttttctctgctgataaaaagccgtttcgggacggcgtgcttatcagacataaagcaatggcgaaggttctcttagagtgatcttcgccatttttagttcatataaggcttttttgcttagccaaagaacgctaagaacgcgataacgacagcgataatcggaagggcctcaaccaatgcgatacccatgaacataagagttctaagttcttttcctgcttccggctgacgggcgattccctctaccgtacgtgaaacgatcagaccgttaccaatacctgcaccaagtgcacctaaaccgattgcaattgcagctgctattaaattcatgaaaaagttcctcctttaaaatgttatccgaatggatatatgattttaatgatcatgactgattttgtgtgacatgtacaccatcgtcagcatcgtaaagataaatgcctggatggtaccgatgaacaagctgaacgcctgccatgcaagcatcggaagaatggctccgactgtgccgaccaaaccgagaaagaagctgtttgagtagaaattcgtcgccagattcgcaagcaggccaagaagaatttccccggcgaaaatgttaccgtaaagacgaagtccgagtgtcagcgtattcgcaaactcctcaatgatcttcatcgggaacataagcggaaccggtctgaggtaatccttagagtattccttcaaacctttcatcttcacgccgtaatagtgcgttaacgacacaaccataacggctagagtcagagtaatagccggatcggccgtcggtgatttccaccaaagctcgtgtccgaccgttacagaaaacggcagccccagcatatttgatacaaatatgtacatcagcaaggttacaccaagcgccaagaagttagcccctgtttttaaatccattgtactgcctataatattgcggacaaaatcaacaatccattccatgaagttctgggcttttcccggacggatggacagcgttctcgtagtgagaatcgcaatcagcagcacaatcacacttgccacagtaatcatcagaatgtttgtcagattaaaagtaagaccaaacaaatcaatagttctgtaatcgtgattcaatgggttttcacctctcttccattgatgaacgtttgagctgaataatggaatctatcataatgacgggataaattgtcattaatccaataatcacacttgccacactgactttatcgggatatttaaaggcgacagccatcgcaagtatcgcattgcaccaacgcgctgcgctcccgagtgatcgtatggactttcctttcgccacggccttgtcaaaagcattcattcttctggtcaagagccacaaattaaacaaactgaaaacagttcccaaaaagaggcctaaaaaaacagttttatacgccgtaagaccatatcccagcaaatagattgctaagattacaaatacatatctccgttgtctgctgaatgtaagattgggatcgtccatcaactatctgtctcctgatgaaaatgtaatataattcctggatacggcaaaacatgcggttaaccctttgcagaaggcctttttttgtcccgcaaaacggcctgttcgaaaaaaccactcatcctcctgatgccacgggatgctgtttcattcgcttagataaatcctcatataacgggttttttggaggatttaaattgaggatggatactagaaatgaaaggaatgaaaaccttctcataataccctcgtttagcatacaatagcccctaacatgtgtcaatctgtttaaagttaaaaaactttttataccgaaagcatacacagaatgttcacaaattcacctataaatgtatgaactctgcccattcagcaaatatctggataaaaaaagaaaaccccctgaatgaggttttccgatttatttggttccgtacagtctgtcacccgcgtcaccgaggcccggaacgatatagcctttttcattcagtttttcatcaagggcggcgatataaatatcaacgtcagaatgatgtttcagcagctcttccacgccttctggagccgctacaagacacataaaacgaatgtttctcgcgccgcgctttttcaggctgtttatcgcttccaccgcagagcctcccgtagcaagcatcggatccacgacaataaattcgcgttcttctacatcagaaggaagcttgacatagtattccaccggttttaaggtttccggatcacggtataatccgacatgtcccactttagcggccgggattaatttcagcatgccgtcaaccattccgagacccgctctcaggatcggcacgataccgagtttcttccctgaaatcactttggatgtcgctatttgaacaggtgttttcacttccacttctttaagaggaagatcacgtgtaatttcaaacgccatcagtgatgcgacttcgtccacaaggtctctgaaatcctttgtgcctgtattttcattccgaatatatgtcagtttatgctggattaaaggatgatcaaatacgtaaacctttcccatactgtgttcagctccttttttgttgtccgagtgactttttcacacttctattgattctacagaaaaagacaaacagtttcaagaaaatcataaaaaaacccgccggattaaggttccggcgggtttcttccttattaatagtccagttctttatataaaggaaacttttcagtcagggcagatacgcgctgtctcgcttcttcaagttttgcttcgtcttcatgatgtttcagcgcgaggccgatgatggcgccgacttcttcaagcgcgtcaccgtcaaagccgcggcttgtcacagctgccgtaccgagacggattccgcttgtgacgaacggtttttccggatcgtaagggatcgcgtttttattagatgtaatgccgatttcatcaagaacgtgttcagcgacttttccggtcagtccgagagaacggaggtcgacaagcacaaggtggttatccgttccgcctgatacgagctgaatgccctctttgttcagagactcagccaggcgcttcgcgttcgagatgacgttttgcgcatatgttttgaaatcatcttcaagcacttctccgaaagaaacggctttggccgcgatgacatgcataagcggtccgccttggattcccgggaaaatggatttatcaatctttttgccgaactcttcacggcaaaggatcattcctccgcggggtccgcgaagtgttttgtgagtcgttgtcgttacaaagtcagcgtaaggaaccggattcggatgaagaccggctgcgacaagacccgcgatatgcgccatgtctaccatgaagtaagcgccgacttcatcagcgatttcgcggaattttttaaagtcgatcgtgcgggggtacgcgctcgctccggcaacgatcagtttcggcttatgcgccagcgctttttcacgcacatcttcataatctatatattgcgtgtctttatcgacaccgtattctacaaagttgtattgaacgccgctgaaattaaccgggcttccgtgtgttaagtggccgccgtgggagaggttcatcccgagcaccgtgtcgccgtgctctaaaatcgtgaagtaaacagccatgttcgcctgagcgcctgagtgcggctgaacgtttacatgctcagctccgaaaatctctttcgcgcggtcgcgggcgatgtcctcaacgacatcaacatgctcacagccgccgtagtagcgtttgccggggtagccttcagcatatttgtttgttaaaacagagccttgtgcttccattaccgcttccgtcacgaagttttcagaagcaattaattcgatcttagtctgttgacgcttacgctcatctttgatggcgttaaacacttgtttgtcttgtacaggtaaatgtttcatcagcgagatcctctcctatccgtttcctgttctttatttttaccacccttattgtacatggtttttcaggtgaatgtaacagcttatttaaaaaaatcacaaaatttaattagaaaacacgaacattatacaggaaaagcattttcatcattcgcattcataaacggcgcgaattccgcctatcagcttcggccttgtccgggccatcgtcacatgtgcttctccaagctcacggcttgatatccggacagggacggcaacgggtttcaaatgcatgccgatgaacgtatcgccgatgtcgatcccggcgtcagcctgaatcgattcggcgagcacgggagaacgcatctgccggtatgcataagaggccatcgctccgcccgctttcgggacggggacggctgaaacaatggggagtctgaaccgctcggccgtttccgcttcaatgacaagcgccctgtttaaatgctcgcagcattgaaaagcaagatgtacacccgttttttccttataccggttaagtccgccgtatatcaattcagcccaatccccgcttccggcggtgccgatccggcttccggcggcttcacttgtactgcacccgatcaccagcagactgccgtccgtcagtcctgcctgctcttgaaactcagtcagcatgtccgtccatttttgcttcatctcttccattgtccagcacctcttacagatttttttcttcgtaatctgcgattttgccgatccgccgttcgtggcggccgcccgtaaattcagtcgtcagccagacttttgcgatttcgcgcgccagccccgggccgatgacgcgttcgcccatcgccagaacattcgtgtcattgtgttcacgcgtcgcttttgcgctgaaggtgtcatgggcaagcgcacagcgtattccctttaccttatttgcggagatgctcatgccgatgcctgtgccgcaaattaaaattcccctgtcagcttcgccgttcaccactttttccgctaccggaaaagcgtagtctgaataatcgacagagccggcgccgcattcacagcccatatcaatgtattcaatctgcaattcatccaaaagactttttatttcttcgcggatatggacgccgccgtgatctgacgcaatagctactttcattcatttacctcctaggtgtggctgggcgaagacagcccagtgtgcttgtcctttttattacgaaatccgttgatttcattctactctttcacattcgttttgcaaatgacctgtttgcagattttctgacagattacttgctttttccgtcaagcaattgatcagccaaaagggtcagcagctcctccagttcgtcccgcgtctgtttataaacatcaagcggaccgccgaacgggtcagagatatcgccgttttcccccgttacgtattctttaatggtaaagactttgccctgactgttttgatatcggccttcaatcagctgtttgtgttgttccgtcatcgccagcaccagatcagccgtctcgatatgttcttccgataagggagatgaactgtgattgagagcgatccgtttttcaaacagcgcttctacggcatgggctgacgcttttccgttcggagacgcgaatacgccggccgaacttacgctgacgtccagccctttcgtttctgcaatggatttaaaaagagcctcagccataggactgcggcacgtattgcctgtacatacaaagattattttcatgtccgtcacctcttactgcctattataaatgaagaaaaaagaaacggcatcttcgtttctttttttacgtatcttatatcggtaaaagcagtttcaacccgaacccgatcaaaatggctccgccaagcgcttcgctgtaggagccgagccacgactgcacctttcttcccgccaaaaggcccgcccatgttaaaacggtgctgaaaaccccgaacagcgtaacggccagaaacggattggaaccgttcatcccgagactgagcccgacagaaaagctgtccagactgacaccgaccgcaaacagcaacagtcccgagcctgccggagatatgagcggcccgtctgattgtttaaacgcggcgatgatcatctgcacccctaaaatgaaaagaagagatccgccgatgtaaacggcgagcatccccagaaaaccggacagcagatgcccggccgccattcccgcaagcggcatcatgacatgaaacagcccgatgactacccctatatgaaaaatctgttttttcttcagctgaatcattcccattccgagcccgacggaaaaggcatccgtccccaaagcaaatgccatgatgcttaaggagacaatttccccgatgaatagattcgacatgaaataaaaacccccttggacgtgcccgcttgtttagcttatgcatgtccgataaggggtagaacaagttaatggataacggtgccgcctgcggctttcatcagcctgttcataatggcgagccccactccggtatccggaaaggactcagaaataatcatgtccacttccgcttcatcaaagctgcggagcgcatcgtataaggcggatgccactgtttcaaggtcggcgcgtctgccgcagaccttgatataatcagcctggtaactatcggcgttctcttctgttgtcaaaatgccgattcgttttccccggcttttatatacgtctgccagttcttgaattctccgggcgccgccgtcggcaatagccatcggcgcagaaggcgcgtaatgtgtatatttcataccgggagaaataggaacctcatcttcttcggtcagccctttatccacaagaaccggaccggcggcggattcaatctgctcttttgtcacgccgcccggacgaagcagcacgggctgtttccccgtacaggacagaacggttgattccactccgattcccgtcgcgccgccgtccacaataccggcaatgcggccgtttaaatcatgagctacatgctcggccttcgtcgggctcggttttcctgataaattggcgctcggcgcggcgatcggcagtccggccgagctgatgagggctaatgctaccggatgatcaggcattctgaccgctaccgtctcaagtcccgcggtgacacggggtgacagcacaccgggcttacacggcagaacaagggtcagcgcccccggccagaatagcttcatcagctttttcgccgtctcaggaatatggctgataaaacgatcaagctggctgatatgggatatatgcacaatcagcgggttatcgctcggccttcctttcgcctcatatattttcgttacggcttccgtattttcagcgttagcgcccagtccgtaaacggtttctgtcggaaaagccacaacctcattctgccggagcaattccgcggcttgtgtaatctggggatcggttgtggataattctgcggaacaatccacaaaccatcttcttgttttcatgtataaccaaactccttattttaaagcgataaaactttattttctctcgtgtattccttttgaaagtataaaagatgtcctttaataaaacaagtgttatccacaaactgtggacaacactttttaataagtggataaccttgtgtataagttagatcaggcagaggttttcaccattaaaaacgaaccttctgtgcataacgagttgcggaaatgttcggacgtatacagttcatcaggcgcatcggcgcacgcttcaaatcccatcacattcagaaactcagcagatgagggctgattggcgactaagtagacatcttgaatctcatgttttttgcacagcacatccatactttgaaacagtgtaacgatatggctttgattcagcctgtccgacatgacgagtgaacggagaagcccttttccgccgctgaatttttcgatcccgagacaggcggcaatctttttttcactgtcttccagcacgataaaacggctgatctgctgattgatttccgcatgtgccgtatcagcctttttcaaaaaggcctccagcgcctccgtatcttgatctcttgccactctcagctgataaaacatatatttccctccgtttcgatcaactctttcttccaatctatgaatcgaatccggatttatgccttttgcttcaggaaaatagatctgaaatccaatcgacgaggaaaaacttcacttcggtatcatcgtcatctttattttctttcttcgctttatcagcctttgcttttacgtcatccagcacttttttagtctgtttctgcgtttcttcctgcttctgtccgccgtcttcctgatctttcaccgcttcgccgtttgagaaatcaaggaagcacagcggcggaaacaagacgcaccaccagttggcgccctcgccattgccgagtgtaattaaaatcgcttcatattttccggccggatagaccatattgccgtagagctttgtcggaaacgagattttattgaattgaactgaaacggattgatgcgcacccttttctttcatcgtctgtttggcgatttctttaatttcaggaagcttcgaacgaatgagccgccgcgcttcttcaatggaagttatatctttcacccagtccgtgatttgcttgtttacagcatctctgatctggcgcttgagcttttgatcctcatcgttatcactgttggccaaaattctgagccggatcgcttcatccggtatgacgacgggctcatcggctgatgcccgcgccgtttcttcttttgtcaaacccgcaagcgctcctgataataaaagaaaaatatatatgcagatcatcattgtctgtttcatcggtccccaccgttcctctccgtgctttttttatctagtcccattatggacatgacgaaaaaggtttaaaccggcgggaagaaaaaaatctagcaagctgataatctgcattgacagattcaaaatatggtacgatattattttgataggaggttttcagatgaaatataattacaccgtgctgctgtcggcggcatgtatgtctgtcatttattctattttgtatgttcatcaattcattatcgcggctttcatttcgatggcgttttattttttgtttccttatttgatttttgcgctgccgcttcaatactttctgaataaaaagccgaagagatttcatccgctgtattttctttattatttaggggtgtcattcattgcaaacgggatcatcttcggtcttttgcagccgtcaggccaatctctgttttctaattcagccttttatatctttgcggttttaacagccgtcgtctattgggtatgggattccgtattgctgcaaagacaaaatccggctacagaagcgtaatcagcagacagccggctgaagggagtgcggcgcaaaagaaaacggcggccatctttaaacgggcgtgccgtccttcttctgtttcagaatgataattggcccgctgctccgctccgcttacggccaacccggaaacgatgatcgctgtgacgataagaacagccgtaacggcgccgaaaatgatgtcaacgccaaacggcagaacaacccccgccgcataagctgcggcggcgagtatacatccgaaggcgaacgcttttttcaaggcggatgcccctttcattttctttccattgtaacaaaagcccgccgtgtgcgtcaccggcgggcttttttcatgatgtgatgaccgcggatacggttctgtcttttccgttgatgtcctgtacgacttccacttccgcattcggaaaggaatgacggaacaggtctttcacggctttcccctgattatatccgatttcaaagacgacaagcgctttatctttcatgacaagaggcagctcctccataaaccgcttgtagaatttcaaaccgtcaccgccgtccgtaagagcatgaagcggctcatggaaacggacgatatccgacaaatcggccatttcttcttcagaaatatacggcggattggaaacaataatatccgctttttttcctgatgaaataaaaggagttaacagatctccctgcaaaaaacagacgtccgctccgaggttttgcgcatttctttccgccacctgcagcgcttcttttgaaatatccgaagccgatactgaaaaatgtccgcattcaagggcgagcgtcaccgcaatggctccgctccccgtaccgatatcaatgacgttcaggcgttctgcctcggaaaatacccgcttttgtctgtccagcagatgaaagacgacttcttccgtttccggacgcggaatgagaacatcgtcattcacaaaaaattccctgccgtaaaactgttctttcccgataatatattgaatcggaataccttctttatgcatctccacgtgccgcctgaatcgataaagctcgtcctcgccgacgggctcctgcagacttgcgagaagcttgctccgatccattccggtatcattcaacagcagcagctcggccgcgtttttttctcttcccgcttcggttaaataagaagaagcccagcttagggcttcaaaaacggtcttcatcttaattttccgcctgctggagcttgcttgactggtcttctacgattaacgcttcaaccacttcatcaagcttgccttccaggatttgatccagcttttgaatcgtcaggccgatgcggtgatccgtcacacggttttgcgggaaattgtatgtgcggatacgctcggaacggtcgcctgaaccgacggctgatttacgggtctgatcatattcagcctgagcttcctgctggaatttgtcatagattctggcgcggagcaccttcatcgctttttctttgtttttaatctgagatttttcatcctgacaggaaacgacgacaccggtcggtaaatgcgtcaggcgtacggccgacatcgtcgtgtttacgctttgtccgcccggtccgcttgatgcgaatgtatcgacgcggatgtctttttcgtggatgtccacttctacttcttccgcttcaggaagacacgccaccgtcgccgtggatgtatgaatacggccgcctgattccgtttccggaacacgctgtacgcggtgcgcgccattttcatacttcagcttggagtatgcgccttttcccgtaatcataaagatgatttctttgtaaccgcccgttccggtcacgtttgcttccatgacttcagtcttccagccttgaatttcggcgtaacgggagtacattctgtagagatttcccgcaaacagcgcggcttcttctcctcccgctgctccgcggatctccatgattacgtttttgtcatcgttcgggtctttcgggatgaggagcactttcaaacgctctgataaggtttccgtctctccctgcagttcggagatttcttccttcaccatttctctcatatcggcatcaagcttttcctcaagcatcgctttcgcatcggcaagctgttctgatgcgtctctgtattgtctatagacttcaacggtttcttgtatatcagattgctctttcgaatattctctaagctttttcggatcgttgaccacttccggatcacttaaaagctcatttaatttttcgtatcgttgttcaattgactgtaaacggtctaacacggtcttcacctctgttttcctgtgcgtaacattctcattatagtatagggcttatcgccagtcaaaagcaattcgcctctgttatactgaagcaaaaaaggaggggcggatatgctgaaatccatccaccatatagcaatcatatgctctgattatgaaaagtcgaaagctttttacaccgagattctcggcttcggcattataaaagaaacataccgaaaggaacgggaatcttataaacttgatcttgcgctggacggcgcgtacgcgattgaattgttttcctttcccgatccgcccgaacggccgaccagaccggaagccgcgggtctccggcatctcgccttcaccgtaaacgatcttgaagcagccgtcagagagttaaaggaaaagggcgtcggcacagaaccgatcagaaccgatccgctgacggggaaacggtttacctttttcttcgatcccgacaagcttccgcttgaattgtatgaagcgtaacgttttttgaagaaatgccgctttctttggcgaattccttcttgttttgtctaacatgaagggaacgccgcctcatggtcgaatacctagcaaaaaggaggtatgtgatcatgaatacaaacatggccgcgaaagagctcggcgtctccgcaaaaacggtgcaaaggtgggtcaagcagctgaatcttccggctgaacggaatgagctcggacattattcctttacacctgaggatcttgatgtgctgaaatcggtcaaacggcaaatttctgaaggcactgcccttctggacgttcaagtgccccggcagccgaaaaaacggacgggcttcattttgcagcgtccgaaaatcaatggcggcgctgaacaaagattggcagagctggagcgcaaactggacattctcacgaaagagaaacaaggtgagaaccatctgctttcaaggatagaagagcttgaacgccagctgaaacaaaaggcggatgaaggggtgtcttatcagcttcttcagcacaggcgggaaattgacgacctcaataccgaattgcagacattggcctcccgcatccaggaacttgcccagacagctcccctctcagaaacagccgcttcttcagaacataagaaacccagaaaaaaaacgagattttcgccctttaaatttcaattctaatcaaaaaagctccctgaaacagggagcttttcattatgcagtcagcgcaatgatgatcggcagtgagatgagagataaaatcgcactgatcacgaacgcggacgcagtttcttcctcttgtttttcgaaacgtgtggcaatcatcgccgctaccgcagatccagggaatgcaacgagcaataccgctttagtgatctggtcagccggaagtccgactgcaagagcgatcaagtacatcagcgcaggctgaacggcaacttttaacaaagcgataccgaaagccggcagactgagcttaatgttgcggataccgacagttacaccgacggcgaagagcgcaacacctgatgttgtgcttccgagctgatcaagcattttttctcccaagccagggagtgttacaccgcagagtaccaaaatgatactgataagcggtgcagccgcaagcggttcggaaagaccgtgaagaatagacttaccagtcattttccagaagttctcgttttcagtgtcttttttcttagatgactcaccgacagtagcaataatgatcgcaagcgggtcaaggatggcgttaaccacgatacccgtaacggcgataggaatcgctacttcgcttgctccgaataagcttccgagtacgggaatacccataaaagcaaatgtcggctgtgcagagtttaaagaaaatacagatgaattcgttaaatcatacttgaagataaatttgcaaaccaacaaaatgacgataaagaatccgacaatcccaatgatcaaagcgaccatcaaaggaacctgtgataaaaacgcacttcttgaagtggttaaaatactagcgataaaatgcgccggaagcgcgtacttcgtaactaaggtgcttaccccttttgctgacttcgcgtcataacttccgaagcgacctgcgaaccatcccagcacgatcacgaaaaagatcggcgccaggaggattaaaatatctaagaagctcaaaatgttctcctccaaatccttaatgtccgtatactttagcctttatataaaagctttccctcggactgtaaaattaatcgtaaaaattatttagcgacaacttgtttatattgcggtttccacattgcatcaagaacggcttgttctacattttcaggaatgcggtttgccacgccttctttaatggcagtttccgctacggcgatcgcaactttaattgaaacttcttgtaagtcgctcatgctcggcagaaggcctgcacccggtgtttcaaaatcaacgctttctgcgattgcgtcagcggttgccgcaaacattgcaggagtaatcactttcgcttctacaacgattgaaccgagaccaagtccagggaacgcgaatgcgttgttagattgtccgatttcatgagaaacgccattgtactctacattgtcaaacgggcttcctgtcgccacaagcactttgccgtcagtccatttgaaaagatcgctaggaacggcttcagcaagcggtgtcgggttagacatcggcatgatgaccggacgctcaacgtgttttgccatttctttgacgatttcttcactgaacgcgccgctttggcctgatgtaccgattaagattgtcggtttcgcttgacggatcacttcaatgaaaggaatttgtccattttcatcgcgtttccaatctttaatttcttcagctgtgcgcaggtacggctcttggaaatcaagaatgttttccataccttcaattaacaagcctctgtagtccattgtgtagaacgctttgttggcttcttcttcagaaagaccggcaagcaccatagtgtcgcggatttggtcagcgattccgattccggcagatcccgcaccgaagacaaccacacgctggtctttaatagacgcgcctgttttcttcatagccgcaagcacacctgcaagcgtaatcgcgcctgttccttgaatgtcatcgttgaatgtaagaatttcatggttgtatttcttcatgatattgcgcgcgtttttgtttccaaggtcttcccagtgaagaagagctttagggaaatatttaagcgcagcttttacataagcgtcaacgaaagcttcgtaacgttcgccttggatacgttcatggcggttaccgatgtataaaggatcgttcagaagtttttcattgttcgtaccgacgtcaagaacgacaggaataacacggcttgggtcaataccggcagcagctgtgtataccgctaatttaccgatggcgatgttgataccgcccacaccccagtcaccgattccgaggatgctttctgagtctgtcgcaacgatcagatcaatatctccggcagtggcatgaaggttttcaaatgcctcttcgattccttccacgttgtcgatagaaaggtaaatcccttgaggtcttctgtactcatggctgtattcttgaatcgcttcaccgacagtcggtgtgtaaacaaccggcagcatttcacgaagatggttttgaagcaatttaaagaaaagaacttcgttacggttttgcaaatcattcaaatacacgttttggcgaaggcggtccggctgagcttgaaactgctcgtatgcgcgttttgcctgctcatcaagagacagaattgtcggaggaagcagcccgtctaatccaaggctttttctttcttctgctgaaaacgcaacacctttatttaaagtagggatagatagaacttcttttcctcttaaagtagtttctaagttgccttccttcgttactttaatattattcaagaaaatctccttctttcttcaaatagttaacaaagttaagtaattacccattttggctagtgtgatcgcgatctgctatatctttttttgacaattattcgaacaatgtctcataactatttacattacttagtcattttatgcctgtaaaaatgaaaattcaagagatgaaaattacttaattttttcatactcttttttaagttatttaactacaatttttgaaaaaacgtcaaaaaaacaccggattttttaccgatgttttcatgaaaagggttatttatcagtctgtttttttcggcacttcgtgatgatgtctgcatctcgcttcgtatgactccgacgcgccgactaaaatgaccggatcatcataggaagcgggcttcccgtcaatcaaacgctgcgtacggcttgccggcgacccgcaaacggagcagaccgcctgcagcttcgtcaccgattcggcaaccgccatcagattcggcaccacgccgaaaggctctccccggaaatccatatcaagtccggcagcgatgacacgatagcctttatccgcaagcgaggataagtcgccgatgatcgattcgccgaaaaactgcacctcatctaccgcgatgacgtccgtgctttcactgatatgatcccatatttcagccgaagacgagatgacgtggcttgtcatggatgtgccgttgtgagaaacgacggcctcctcactgtagcgattatcaatggcaggtttgaacaccttgacctcctgcttcgcatatgtcgctcttttcactctgcggatcagctcttctgatttcccagagaacatgctgccgcatatcagctcaagccatccgctttgcttcattatgtacataggctatccgctcccctttttttcctgtttatggacataaaaaacaggcaagaagcaattcttgcctgcctgtaaaatctattattacttaagaccgtattttttgttaaagcgatcaacacgaccatcagcagaagcgaatttttgacgtccagtgtagaatgggtggcattcagagcaaatctcaacgcgtacctcttcttttactgagcctgtttcaaattcatttccgcaagcgcatttaactgttgcttttttgaaattaggatgaattcctgctttcattgtatccatctccttccgccctgaatcccgtgtggaaacagagttattattccggagtaatccggaacgcatatgagagaattatatcagtcatttactgcatttgcaaatacattttttatcagcggcgggctgatgatgaaaggtttgcctgcttccattcttggttgatcagatcgaagaattcctgattcgtttttgtttttttcatttttctcataaacttctctgcgaagtccggagaatcagacatcgatttgcggatcgcccatagacggtcaagatgctctttcggcacgagcagctcttccttccgggtgccggagcgtcggatatcgatcgccgggaaaatccgtctttccgcaagagaacggtcaaggtgaagctccatgttgcccgttcctttaaactcttcatagatgacgtcatccatccgggagcccgtgtctacgagcgccgtcgccaaaatggtcaggctgccgccctcttcaatgtttctcgcggcaccgaaaaagcgcttcggacgatggaacgcagccgggtcaatccccccggaaagcgtacgtccgcttggcgggataacgaggttgtaggcccgtgccaggcgggtaatgctgtccatcagaatgataacatcttttttgtgttcaacgagacgcattgcccgttcaagcacaagctccgctaccttaatgtgattttccggcacttcatcgaacgtcgagctgacgacatcgcccgctacggaacgttcaatatccgttacttcttccggtctttcatcaattaagagaacgatcaattcagcgtcaggctgatttgtcgtaatgctgttagcgatttcttttaacagcatggttttaccggctttcggcggcgccacgatcagaccgcgctggccgaaaccgacgggagccatcatatcaagaattcttgttgagagataattcggtttcgtctcaagcaccatttggcggtccggataaagcggagtcagcgcaggaaaatggacgcgctctttcgcagattccggatcatctccatttaccgcttcaacgtgcaaaagtccgtaatagcgttcgttttctttcggcggacgcaccttgccggatactttgtcaccgtttcttaaatcaaagcggcggatctgggaagcagaaatgtagatgtcttctgagcttggcgagtaattaatcggtctgaggaagccgaatccttccgattggatgatttcgagcacgccttccataaacagaagatcctcctgctcggcgttggctttcagaatggcaaagattaattcttttttagtcagtttgctgtagtaggagattttataatgtctggccagttcatatagttcttttaatttcatattttccaaagaggaaatagatacgtctttcataaaaacaccacgcttttcatagtcaatgtattgctgttttcattcaaatcggctgcttcgcatgattccgccaaagcacattcttttataaaacgttcaggaacttctatcggtaacacttccacccatgatcggcgcttttttaaaaaaggaatgtcttaatgagttttgaaggaagcgaggacaaaaacttgagaagatcaatatttatatcgtctgtatgcggtagaatttgaaaatttcccagtactcaaaagaaggaatgacacagaaaaatcgcagcactctttatttttacctcatttcaaaaaattattcaacttaaataatgctttgacatataaatgatagggttgactctttattgcaaaagaaaagcgggactttccgtcccgcttttctctatttatggccggatcacaagatttggttttttcttcaggctgtgtcttccgtcaacgaatcggaccgttcctgatttcgcccggatgaccagactttcagtcgtgccgacggagcctttgaactgaacgcctttcagcagctctccgtccgtgacgcccgttgcggcaaaaatggcgtcatcccctctcacaaggtcctccatccggagcactttggatacatcaaggcccattcgctcacagcgggcctgctcttccgcactttgcggcagaagcctgccgatgatttcgccgccgagcgcttttaacgcaacggcagacagcacgccttcaggagccccgcctgaaccgaagagaatgtctactcccgtatggtcaaaggccgtattgatggcgcccgcgacatcaccgtcgttgatcagtttgattctggcgcccgcctcacgcaattcagagatgattttttcatgtctgtcacgatttaaaatggttgccacgacatcttcaatgtctttgtttttcgctttcgcaacggcttttaagttatcaatgacaggcgcttcaatatcgatgcagcctaccgcttcgggaccgaccgcgattttttccatatacatatccggggcgttcagcagtgttccgtggtcggcgaccgcgatcaccgtcagcgcattccagccgccgctcgctacgatgtttgtgccttcaagaggatcgacggcgacatcgacgcgcgggccgtatccgtttccgagcttttcgccgatgtaaagcatcggcgcttcatccatctcgccttccccgatcacgaccgtgcctttcatcggcaccgtgtcaaacacgtcacgcattgcgcttgtcgccgcatcatcagcttcatcttttttcccgcggcccatccatctggcagatgctaaagccgccgcttcagtgactcgaaccaattccatcgataagcttctttccatttcaacacgatctcctctcaaaagtccgcatttctatgaattttggagctgttctatctcttcgtccgtcagcctttgccgccagattgtggcgcccagaccttcgagttttttctcaagattgctgtagccgcggtctaaatgctcgagaccggtaatttcggttacgccgtcagccatgagcccggcgacgaccagacaagcgcctgcacgcagatcgctcgcctttacttttgcgccctgaagctcggccggaccggtgataatggccgacctgccttccactttcatgttggcccccatccgtctcagctcatctatatgtttaaatcgggccgagtagatggtgtcggttacgacgctcgtgccgctggctctcgttaacagagatgtcatcggctgctgaagatcagtcgggaatcccgggtaaacaagcgtttttacgtcgaccggttttatctgcttctgcccgccgagcataagaagctgatcgtcactcgtctcaatgtgaaaacccatttccctgagcttcgccgttaaagactccaggtgagtcggtatgacattatcaataatgacttctttccccatcgcggcgccggcgatcataaaggtgcccgcctcaattctgtccggaatgatcgtatgcctgcatccgtgcagctcttttacgccgtcgattctgattacattggttcccgcgcctttgatctttgcgcccatgctggtgagcaatgtggcaacatcaataatctcaggttccttggcggcgttttctatcacggttttaccttcagccagtacagcggcaagcatgatattgatcgtcgctccgacgctgacgacatctaaataaatccgtgcgcctctcagcctctcggcgcgcagataaatcgcgccttgttcattggtgacttccgccccaagcgcttcaaaccctttgatgtgctggtcaatcggccgcggcccgagatggcatccgcccggcagtccgatgaccgcctgtttgaagcggcccagcatcgcgcccattaagtaataggaagcgcggagttttttcactttgccgttgggaagcggcatgctgatcatcggggaagggtcgacgaccatttctcctttttcaaaatggacgtttccgccgatttctttcagcaggtcacgcagcgtttcaatatctgagatctccggaagcccttcgatcgttacttcggaatttgccagaatggttgcgggtatcaatgcgacggcgctgtttttcgcgccgctgatatgtacggttccgtttaacggatcgccgccggcaatattcaacttttccatgatagtctccttccataagaagatagctgcggagcgtaaataaaatggcattttattctgtctctgcaaataaagctcttgtccaaaatgtagccaattcgaagagaaagaatacaaggacattataaaataacaggaagaaaatagcgaagctttgcggggcatttttaacacaggatgcacagaggcccgccgggttcacattccggggaaacacactcttcactttgatactgaaggcccgctgccaaacaggaaaacataagggtgcggcaaacggatgcaaccggtttgccgcccttttcacccttatttattccagtctgccaagaattgctcgatgcctttatccgttaacggatgtttcgccagctggtgaatgactttcagcggcatcgtaccgatatgcgcaccgcgtaaagcggcttcagtcacgtgctgcgcatgacggatggaagctgcgatgatttgtgtatcaatatcatgaatgtcaaaaatctgtcttatttctgaaatcagttcaagaccgttatggccgatatcatccagacggcctaagaacggagatacataagtcgctccggctcttgccgccaaaagcgcctggttggcactgaagatgagcgttacgtttgttttaatgttcagatcgctcagcgcttttacggcttttaacccttcagacgtcatcgggattttcaccgtgatattcggtgcgattttcgcaagttctttaccttcttcaatcatctcttcagcattcagggaaatgacttccgcacttactgatccgctcacgacttccgtaatctcacgaagtctgtcatggaaagacacgtcagcttcttttgccactaaactagggtttgtcgtaactccggcaagaacgccaagttcataagcttctttaatctcgtcaatgtttgctgtatcaatgaaaaataacataaggaaagcctccccagtaataaattttcagaactgtaaaacatgattgcgctttctaaaggtaagacataaaaccgcctgtcaatgctgtcaggcggtttatggatgttacattggattaagcttggtttgaagaaccgaactcacgcattttgccgataaccgtttctttgatcgcttcacgagcaggtccaagatatttacgaggatcgtattcgttcggcttagctgccaatgtttcgcggacagcttttgcagaagaaatttggttttcagtgtttacgttgattttagccgtaccaagtgagattgattttttaatgtcggcagtcggaattcctgtaccgccgtgaagtactaacggaaggccggttgatttgccgatatcttccatttctttgaaaccgaggttcggttcgcctttgtaagggccgtgaacagaacccagtgcaggtgcaaggcagtcgatgccagtgcgctctacaagttcttgacactctttagggtcagcatagattacgccttcagcgatcacgtcatcttcctgtccgcctacagttccaagctcagcttcaactgaaacgccgtggaaatgagcaagctcaaccactttagctgtagttgctacgttttcctcaaacgggtggtgagatgcgtcgatcattacagaagtgaagcctgcatgaatcgctttcgcacaagattcaaagcttgaaccgtggtctaagtgaatggcgacaggaactgtcactttgtattcttccataagagctttaaccatggcaaccactgttttgaagccgcccatgtagcgtcccgcgccttctgaaacaccaagaataaccggggatttttcctcttctgctgcttgtaaaatagcttgagtgaactcaaggttatttaagttaaattgtccaacagcatatcctttttctttagctgtattcaacatttccgtcattgaaactaaaggcatgtcgaaagtcctccttatgtagcctgatttgcttcttctcgaaaaaagctttccacctatagcatgaccataaaaacctgtcatatgtaaaacaacagatcgctttttctccatctctaggataccaacttttcgacaaatcggcaacacaatgacataattgtttctaattttattaattcgattttagaggtaaatattttttcaccgcgtctctgatctcatcaatgtcaaaaggtttcgcaaaatgggtcagcgctccgagctcttttgattccttaatcatatcgagttctccgtaagcggtcatgataatgacgcgtattgattcgtcgatcatcttcatgcgcttgagaatttcgattccgtccatgccggggattttcatatctaaaagcacgagatcgggccgttctttcgttacgatgtccagcgcctgtatgccgttggcggcctgaaacgtctggtacccttctttatgaaacacttcattgagcaatatgcgtataccgtattggtcatctacgattaaaatcttttcattcatcattttacaccccaatattatcattttcgtcaaaaggaagcagttgtttatgtattctgtttgattttcacatttcctttaattataatagtttactttccgacattttctgagcattttctcttttgttgtatactgttcttgtatgtgtaaaggaggtttcactcatgttaaagatatttacgacgcagcttgcaggcattttttcccgcattcaggataaggaatccgaagcaatagaagacggcgcgcgcctgctggcgcaggcagccgtcagcggccataccatttatttatacggcgcaaatgagatgcagggcattttgtgcgaagcggaactcggctcagaaccgatgccttccgtcaaagcgtttccggatacagctgattcgattacagaaagcgacagggtgctgatgttttgttcaggtccgggcacggctgaagaacaggcgctggctcaaaagctttatgaaaaagggatcggcctcgttggcgtatctcctgtcatcaaagatcaaaccgggattgaggaattttgtgatgttcatattgacagcaaattaaaaatgccgcttctgcctgatgaagacgggacaagatacggctttccttcattaatgacaggcctgtatgtctatcacgcactgtcctttacgttaaaggaaatgatgcaggaatatgcctgatgcagaaaaaagacttgccgcttttaaaggaggcaagtctttttttattacttctgttctgcagcttgtacggaagcgccgataaagtctttgaataaaggctgaggtcttgtcggtcttgatttgaactcagggtggaactggcaagcgacataccaaggatggtctttcagctcgatgatttccacaagacggccgtcagggcttgtgcctgagaacacaaaaccgttctcttccatttgctgtctgtattcgttgttgaattcataacggtggcggtggcgttcgtataccacttcatccgcatacgcttcgaaggctttcgtgtcttcctgaagcttacaagggtacagtccgagacgaagcgttcctccgagatcctcgacatctttttgttctggcagaaggtcgatgatcggataaggagtggacggatcgatctccgcagagtgagccccttccagacctaatacgtttcgcgcatattcaatggatgcaatctgcataccgaggcagatgccgaagaacggaattttattctcacgcgcatacttggcggcgatgattttcccttctacgccgcggtctccgaaaccgccgggcacgatgattccgtctgtgccgccagtcagttcttgaatattgctttctgtcacttcttcggcgttaatccatttgatcttcacatcagcgtcaaacgcatagccggcgtggcgcagtgattcaacgactgaaatgtaagcgtcttgaagctcgacgtatttaccgacgaggctgattgtaatggttttagacaagtttttcactttcgtgacaaggtctttccattccgtcatatccgggtctttgcattctaatttcatatgatcgcagacaagcttatcgagtccctgctcctgaaggttaagcgggatggagtaaaggttgtccgcatcttcgcactcgatgaccgctttcgtgtcaatatcgcagaagagcgcgattttatctttcatatcttgagaaatcggcatttctgtgcgcacgacgatgatattaggctgaataccgaggcttctcagctcttttacgctgtgctgcgtcggttttgttttcagctcgcccgccgctttgatgtacggaacaagcgtacagtgaatgtacatcacgttttcatggccgatgtcgcttttcatttgacggatggcttcaaggaacggaagggattcgatgtctcccactgttccgccgatctcagtaatcactacatctgcgtttgtttctttgcctgcacggtacacgcggtctttcagttcatttgtgatgtgcggaatgacctgaaccgttccgccgaggtagtccccgcggcgctcttttttcaatacggcagaatagattttaccggtcgtcacgttgctgaatctgttcagattaatgtcaatgaaacgctcataatgccctaagtcaaggtcagtctcagcgccgtcatcggtaacgaatacctcaccgtgctggtacgggctcatcgttcccgggtcaacgttgatataagggtcaaatttttggatggtgacgctcatgcctctgtttttcaaaaggcggccaagtgacgcagccacaattccttttccgagtgatgatacaactcccccggttacaaaaatatatttcgtcatttcgtttgctcctctcttcggtctgcgctacattccttaaaatgtgccgttttatagaaaatcatttcactaaaaacaaatgatgtgtaaaagaatttgggagatgaaaataagaaagctccctttcaatttcttgaaagggagcgtagcactcttatgaattctcttctttttgaagagcccaaaatacatactacatagttcgacaatgaaagtcaagatcgttttgctgatataaaatcagtctttgcgatcctcttcctcatcatcataatcttcctcatcttcttcaatcatctcgtcttcgatctcaagctcgtcgtcatcttcttcatcgatatcttcgtcgtcaaagctgtctgcgtcaaggtcaatatcttcttccatttcatcgagatcgatgtcatcttcgtcaacttcctcgaattcatcaaggtcgagatcttcctcaacgacttttttcgcttttttctttttcgcttttacagtcggctgtgtttcttcgtccagctgatcgtacggataccagctgcgaagcccccacgtctggtctgacagagcaataaagcggccgtcaatgttcaggtctgtataaaattgggcgatacggtcgcccagttcctctttcgtaacaccgagcaaggagatcatttcattcagcagctcctggaacggaaccggttttttatgttctgagaaaatttcgtgagcgatttcaactaaagccatctgcttcagctgttcctgagaatattgtttgatactcaaggtcggacactccctttctattacttatatgtatctgtttctatcctataataagaacgaatttgtattgttttgttcataaaccatacctctcattataaacaaattaaaacagaatatgctacccttaacagcgtaatttaagaaattttagagctgtcccttcataaatcggctgatgtgcgaaaacaaagccgccggcatatgcgccggcggcccgcttctttctataaagactcttgtttttcagcgccgaatacagacatggcgagcaattcactgacatcataagtgccgacagcgtcttcggcttctttcgctttcgtaccgtcaccgagcatggtcagacagtaaggacagccggagctgatgaccgtcggactgacagaaagcgcctgctcagtccgggccgtgttgattctcgctcccgtttcttcttccatccacatgagccctcccccggcgccgcagcacatcccgttttcgcggctgcgctccatttccttcaattgaacgcccggaatggcttttaagatcgctctcggcggctcatacacttcattgtatcttcctaaatagcacgagtcatggaaggtaatcgtttcattcaccgggtgaagcggttttagtttcccctgtgacacaagctcggctaataattcagtatgatgatagacttcggcccggaatccgaaatcaggatattcatttttaaacatattataggcgtgcggatcaatcgtgacgatttttttgattccgtgtttttcaaattcgccgatgttgtgttccgccagctcttgaaacagaaactcgttgcccaaacggcgcggcgtatcgcctgagtttttttccttattgccgagaatcgcaaaggatacgcccgcttcattaagcagctttgcaaatgagacggcaatcttttggctcctgttatcgtaggaacccattgagcctacccaaaacaaatagtcgaactctttgtcttgttttttcatttctttcactgtcggaatctctgtatcagcctgctcccgccagttctcccgctctttccggtttaagccccacgggtttccctgtctttcaatgctagtcatggcccgctgcgcgtcgctgtccatcttcccttccgtaagcacaagatagcggcgcagatcgataattttatcaacgtgttcattcatgaccggacattgatcttcacagttgcggcaagtggtgcacgcccaaatctcctcttccgtgatgacctcgccgattaagctcgggttgtaatcaatggctgcggccgcttcacgcgatcctccccctgaggaagccgcggcgagctgattcgctttcgtgtgctgaaaaacgggcgcgggcacccacggagattttgacgtcacggcagcgcctttttccgtcaaatggtctctgagctttaaaatgaggtccatcggcgagagcatcttgcccgtaccggaggccggacacatatttgtacagcggccgcattcgacgcaggcgtaaaggtcgacaagctgagagcggcggaagtcttcaatctttccgacgccgtagctttctttcgtctcatcggtgaaatcgattttttccagctttccttttgaatccagcctgctgaggaacacattcgccggacccgcaattaagtgcgcatgctttgattgcggcacgtacactaaaaagctgagcaaaaacaacagatgaagccaccatgaaacataaaacacggcggcggccgccggcgctgaaagaccgccgagcacaatcgcaatggaggaggcgatcggctccgtccaagacagagaatgatcgtgccataaaaggttcatggcgttcccgagaagcaccgtcaccatcagtccgccgataaacagcaggacaagccccgctttaaacccgcgtttcagtctgacgagtttttcaatgtagcgccggtaaaacgcccagactacggcgattaaaatcaaaaacgtgacgatttcctgaaaaaaggtaaacgccggataaagcggaccgaacggcagatggcggtcaggaagcagccctttcagaataaaatcaattgcgccgaactgaacgagtataaaaccgtaaaaaaacagaacgtggatgatgccgctctttttatctttcagcagttttttctgtccgaacacattcacccatatcttctgaagacgttctttcaggcgtttatcaaattcttccctttggccgagcttaatataagcgatcctcgttctgatcaggtaaacgaataaataaacggcgtaagcggttacagctgaaaacagcagcgcgtttaccatgagaaatgcgttcatcttgtctccccctttgttctgatacccctcttcattgtcatatctttactttatcataaataatgaatgagtgttcagtcaataattaaattcacattctcagggcacactacgaatacttcggaaaggagcgtcggtatgaaggtcatttttgtgttgcttgtcatttttatcatattgatcgcacttatgctgcttgatatgctgcttggccgggcggcgtacaaaaaacaggcgtatgagcccgtttttgacccgaaaaagagtgatatcacactcattcactgcggcagcgagcttgtgcggcagatgacggctgatatccgccaagccgtctcttctattcatatgatgttttttattatgaagaacgaccaagtcagccatgagatgtttcatttattgaaggaaaaggcccaggccggcgtctccgtatatctgctgctcgattgggcgggcagccgccaagtgaaaaagccttccattcaaacgatgaaaaaagccggcgttcacgttcattttctaaataaaccggcatttccgtttctatttttcaggctgcaaaaacgaaatcaccggaaagtgaccgtcattgacggcaaaatcggctatgtcggcggttttaatatcgctgaagagtacctcggcaaaaaagcgaagttcggaaactgggaggattatcacctgcggatgaccggggaaggcacggcggatcttcagactctttttgtaagcgatctgaaacgaaacaccggaaaggcacccggatcacccggggtttatccggcattatccgaagggaatatctctcataggacatatgcgtctgacggtttttcgcttgaatcgcattatgaaaactgcatccgtaaggcggagaaaaaaatcattatcggcacgccttattatgtaccgagcaaaaagcttcaggaagcgcttatttcagcctgccgaaaaggcgtcaaagtcatcttgatcgtgccgatgaagtcagaccacccgctcgttcgggaaacagctttcacctattatcccgagcttctgaaggccggctgcctcatctatcggtattatcaaggcttttatcatgtcaaagctttcattattgatgaccgcatcagcattatcggcacgccgaattttgataaacggagtctgttctggaatgaagaggtgaatgtcatcattcatgatgaagcctttacaaaggaagtgctttcaaccataaagcaggacatcgaaaaatccgagcttctcacattagaaaaagtgaaacagcgctccgtcagacagcttcctgcagaatggctgggaaaggccatatcttactttttataaaggagaaaccatatgctgttcagattcggattcgtcgcaaacgccatgtgcctttgggacgcgtcccccgcaaaaaccttaacatatgcgcgctataccaagctttcccgcagtgagcggaaagacgccctgctttctgtgacgaaagcaaatcttaccaatacgctgcgcaccatccactatgtggtcggccacggcatcccgctgtacaggttctcaagctcgattgtgccgctcgccacccacccggatgtgctgtgggattttgtcacgccgtttcgccaggagtttcgtgagatcggcgggctggtcagaaaatatgacctcagaacgagctttcatccgaaccaattcacgctttttacaagtccgaaacaggagattaccgcaaatgcggtcaaggatatgacctatcattatgacatgctggacgcaatgggcatcgcggaccgttccgtcatcaacatccatgtcggaggcgcttacggtgacaaacaaagtgcccttggccgtttccgcgtgaatctgaaagaacttcccgatgtcatcaaacagcggatgactttagaaaacgatgataaaacatatacgtccgaggaaacactcagtgtatgtgaacaagaaggcattccgtttgtgtttgattatcaccatttttacgccaatccgaccgatgacgctgatttagatgacattcttccgcggatgatcaaaacatggcagcggatcggcttaaagccgaaggtccatctctcctcgccaaaatcagaatcagccgtacgcagtcatgcggactatgtagatgcgaattttattctcccggtgctggagcggttcagacaatgggatacggacatcgattttatgattgaggcgaaagagaaagaccgggcgctgctccggctcgtcgaagaattaagcgccatccgcggagtcaaacgcctggcgggcggagtgctgaagtggaaggcataaccaggtttatcacccgtttatatggggaatttccgaaataacagaccatcagacggaggagaaaacatatgaaaaacattacatctttgaaaatagccgctaagaagttcactttacgaaacatgcttcagctttatcatctttgccacacgggaggccacgagctgtatatctactctaaaaaaacgatgtgcaaaatcaaagatatcattgagctggaaacgttcagaatggcccataaagaacaagaatatttaattgtagtggaaggaaagaaagcggtgcagcttgttgaccgtttcaaacatatcatcgaacctgcgcaaaaagaagcccattaaatacggactacataaaaaaaaggatagacaggaggctgaccccttttgtctatcctttttcttttattgatgtatcagctcgccgaattgggcctgatgaagtctctggtacatgccgccggatgccagcagttccttatgatgaccttgttcagcgatgccatctttcgtgacgacgacgatccggtccgcatccttaatcgtagccagccgatgggcgatcacaagcgttgtgcgtccttcagacagctcttgcagcgatttttgaatggcggcttccgtttctgtatcgagggctgatgtagcctcgtctaaaattaagatcgacggatttttcaaaaacattctggcgatggaaagccgctgcttctgcccgcctgacagcttcacgccgcgctcgccgatcaccgtgtttaaaccgtcgggatacccgtttaccaagtcctctaaatgcgcctggcggacggcctgccagatttcttcctcagacgcgtccagccgcccgtaagcaatgttttcccgcaatgtgccggaaaacagaaagacatcctgctggacgacgccgatttgtccgcgcaatgatgacagcgtcatgtccttaatatcgattccgtcgatggaaatcacgccttcagacggctcataaaagcgcggcagcagacttgtcagcgttgattttcccgctcccgaaggcccgacgaatgcgactgtctccccggcatgaatggacaaattgattcccgacagaaccggactgttttcttcgtaaccgaatgacacaccatcataacggatattcccttttaaaccggacacatgtctcgcgttcggggtgtccttgatatcaggctccgtttccagtatttctataaagcttttaaaaccggcaatgcctctcggatacatctcaataatcgcgttgattttatcaatcggacggaacagaacgttcgtcagcagcacaaaagcgacgaattccccgtaagataacgatccgcgtatcacgaaccatgtgccgcacaataagacgaacagcgtgacaaatcttgtcagcatgtaactgatcgagccgtttttcgccatgattttataagacgtcagctttgttttgcggaaactctgattgttcacgtcaaaccgctgcgtttcaaacgcttcattgctgaaagcctgaacaagacggatgccgccgatattgttttcaaccctcgcgctgaagtctccgacgtctttgttcagttttgtaaacgcagaggtcatttttttattgaaatacaaagcaagccaaatgacgaccggcataatgataaaagtcaacagcgcgagctgccagttaataaacagcatcacaccgaacgcgcccaaaatcgtcatgatcgcgataaacaggtcttcaggcccgtggtgggcggtttctccgatatacatcaaatcattggtgagcttggacattaaactgcccgttttgttgttatcgtaaaatttgaacgaaagcttttgcagatggtcgaaaagctttttccgcatatccgtttcaatgttaatgccgagcatatggccccaatacgtcacaacatactgaagtgccgagctgagggtgtagaccccgaataaagcagcggaagtcaaaataatcagactccaatcccgccccgggagcaatgtatcgataaagtaattgacaatcagaggaaaactcagctccatcaatccgccggcgatggcagaaaagaagtcgagaaaaaacagctttttgtacggtttataataagaaaaaaattgtcgcagcacgattccgtcctccttgtgcctcgttcttaatgataatatttctcaattatactatacacaaggagttttaaaagcgttttttataaaacgccggaaaataaccgtgcgaaggattccttcgttctttcccataatgtgcgcttatagaaacggacggggctgattttttcagactccttcatatcctccaggtaatgcgcttcaagatctttgatcgcctcttgatctgtaaaaaagacattgacttcaaaattcagctgaaagcttctcatgtccatattcgccgtcccgacagaggcgaggtttccgtcagtgatgagcaccttttgatgcataaagcctttttgataagaatagacttcgattccttcgcgaagaagctcggggaaatacgatctcgtcgcgtactgggttaaaaatccgtcattggtttccggcaccatgacacgcacccggacgcctctggcagcagcctcctttagcgctgtgcggatcggctcattcggcacgaaataaggcgttgcgatccatacagacgattcggccgccgctatcatggcataatacagatcgctcatccgctccttcatatcggggcctgtcggaacgacttgatagacgccgccgctttctgccgcaaccgggcgggtatatgctttctgatcaatcagcacctcatccgaaacgtattcccaatcaagcataaaaatgctgtggagcgtctgaacgatttctccttcgactttcatatgggtgtcccgccaaaagccgacatcttggtctttgccgatatactccttgccgacattcagcccgccgacaaaaccgactttcccgtcaacgatgacgatcttgcggtgatttctgaaattgaatttttggttgaaaaaaccgtatttcagcggcagaaacgggacgatgttcacacccgcgcgtttcagttttttaatatcttttccggccagcttcaggctgccggccgcgtcgaacaaaaaccgcacttccacgccttgacgcgccttttccatcataatgtccatcatcttgtgcccgagcatgtctgatttgaacatgtaatactcaatatgtataaatgacgcggcctcccggagcgcctcaaacagctccggaaatgtttcgtccccgtttttgagcaccttcagcctgctttttgtattgatattcatatgggacgccttgattgaatattgaaagaaacgcttctgatttcctttcagcccggtcaggtcgggagtttgttccatatcaaatatcgttctcagcttttcccggttgtatgtccgtttcgacctgaacagcttgcctttttcataaagctggccggaaaaaaggtaaaataagtacccggcgatcggaaaaaacacaagaatatgaatccataacagcgtgtgctgcgaggtgcggttttcaagaattaacgaataaatgctgaacaaaataatgcttgcataacaaagcacccctccgtaaaactcaagcctggaaaccggaaaaaaccatatgacatatgctacgataagcatcatatataaaaagcaaaattccagtctccttttcagcatcccgactctctcccatctgatccgatatctctgtataccctctgttttccggcttgtaaacatatgaaaaagcctctccgcacgagcggaaaggcttatgatgaagcttcctgtgattggccgggtgtgatgttctgaagcaatgccggattgagcgagcagctgcctttgattttatttttgaagatgccgatgatcagaccggtgaccgctatcgacactaaggagaagagccctttcagcagcccgacggaaaaaatgccggccagcacgaccccaaaatcgaagaggaaattaacggcacccggattccatccgcagcgcttttgcagaaataaagcaaggatattggcgccgccgagcgatgcctgatgataaaacatgagcgacaggccgaacccgatcagcgccccgccgcaaatcgccccggcaagcggtgaaacagagaccggcggcagccagtgatccgcgccggtaaatagagtcagcactgtgactgcaaaaacggtggatagagtgaatttgattcccattctgatgagagaaaatatataaaacgggatattgatcagaaagaagataatcgcaaacgaggaatgaaacaagtatgacaggcttagtgacagtcccgctgtgccgccggttaatacttgagaatgtctgagtgtcaggacgccggcgcttgtcatcagacaggcggctaaaatgaggaaaatccgcttcattcttcactctccttttgttgctgttatttccaaataaaatataacaggaatcccggccgcccagccattaccttggcagaaaatatcttatgtttttattttttcaccataaaaaatccccctcttgcaggggggatttttacgtgcgtttccgatagacaacatagctgcgggtcaaatacttgaggggcaggctgaacacgtgaaccaatcttgtaaacggccaaaggataaaaacgacgtaccctatgatgatatgaaacttaaaccatagcgggacactttccatcaaagaagcgtcaggccggaacaaaacaatttccctgaaccacggcccgactgttgccctgtaatcaaatcctttcgagtcaatgttgaggaacgtggccgcaacgcccgacagcatcatgaacagcagcagaataagcgtcaggatatccgatggcgagctggttttgcggattcttttgtcaaacagccttctgtacgtcaggatgacaagtccggcacatgcagcaatccccgccggcaggcctgcgccgatcgccattttgtgatacatatgctctgaaatgccaagggaagcatacacgccttccgggatcagaattcccatgacatgtccgccgacaacgcacagcagtccccaatgaaaaagtgtgctgccagccgcgagttttttcttttctaacagctcgcttgatttcgccgtccagccgaattggtcatgctgatagcggtaaatatgcccgccgataaagatcgtcaatacaatgtatggcataacgccccacaggatctgcccgctcatgcctgaacagccccttcttcagtgcttgcatgtacaccgatgttttccagtgcggcctgcagcacgtgcagcagctcagcatagatgctgttatttttttcgaggcgggaagccagctccctcacattggacaggtatttctcaaacacgcttctcgccgcttcaatctccgcaaccgcggcgaattccagcatcagcggcaggtaatcaggcagttctttctctgtcggcaggaaaccggattgctggtaggtgttttttaaatgcagcaattcaatgccgcgttccctttgttcgcctgagttaaagtaggtgacgtacatattcgttttttttccgaaatcgaacgtatacacatagtgttcaatcagcgcttgcggagaaaagcctgcttccgcctctaaaaagtgcagcaatttctcccggatttgctgattggtgatgtcatggataagagccttccaatcgggaatctcggctctccactcttcatccggataagagagaagaacggaaagagcgaagaacgtcatttgccggtctgtggtgttcatgttattacacctcatttatgaaaaattagaaacaagagccggggccgcctgaaaatgataaaccgcagctcccttgttcagcatataaatctgacacttcttctcgatggctgctcgggatcacaaaacggtcatcatatttggcgattgccagcagccgatacatgtctttaatttgctgttctgttaagccgacactggagaccaatgccgggtccatggatttattcgtctgaaccgccctcatatactggcgcatgacagacattttctttaacgtggatcgaatatgatccgtatcccccgccgttaacagctgcgccaaatagtcaatcggaattctcatttggtcgatagccggaaaaatcgcttccgccgtttgccggcttccttttccttcaaagagattcataatcgggctgagcggcggaatgtaccaaaccatcggcagcgtacggtactctggatgaagtggcagcgcaatcttccagtcaatgatcattttatagattggtgattgctgcgccgcttctatccattcagccgggatgccttgttcttttgccagtttggcaatctcaggatcattcggatcaagaaaaacgtccagttgggaatggtagagatccttttcattttcaacagaggccgcttcctccactttgtccgcgtcatacagcatgacgccgagatagcggattctgcccacacacgtttcggagcagatggtcggcagccctgcctccaatcgcgggaagcagagtgtgcatttttccgctttgttcgtctgccagttaaaatagacttttttataaggacaggatgagacgcaatatctccatgaacggcatgcattttgatccacaagcacaatgccgtcttcctcgcgtttgtacatggcgccggacgggcaggaggacacgcacgccggattgatgcagtgttcgcaaatacgcggcagatacatcataaagacctcatcgaattccgttttaatggattcctccattttttgaacgtttggatcttcaagccctgtaatatggccgcccgcgagatcatcctcccagttcggaccccattcgatattcataaaatcccccgttaaggacgatttcggccgcgccaccggctggtgctttttttgcgggctgtttgttaatgtttcataatcatagttccaaggttcatagtagtcatcaatcgtcggctggttcgggttatagaaaaggcctgcgagccgattcgttttcgggcctgatttcagttcaagctttccttttttcaacgtccagccgcctttatatttgtcctggtcctcccattgcttcgggtagccgatgccgggctttgtttctacattattgaagtacatatattccgcaccggaacggtttgtccatgtgtttttgcaggtgacgctgcacgtgtggcagccgatgcatttatccaaattcatgaccatcccgatctgcgctttaatcttcaagccaatcgacctccttcagcttgcggatgacgacattcaggtcgcgctgattccccgtcggaccgtaatagttaaagccgtaactgagctgtgcatagcccccgatcatctgggtcggcttgacgtgaatccttgtcgggctgttatgggtgcctccgcggttattcgtcagttttgtgccgggcacattgatgtggcggtcctgggcatggtgcataaacgccattcctttaggaatccggtgagacaaaaccgctctcgcgacgacaacgccgtttcggttgaagcattcaatccaatcgttgtctttgatatccgtatccgcagcatcatctttattcatccacacagtcggcccgccgcggaacagcgtcagcatcggcagagaatcaaaatacatgctgtggacggaccatttattatgcggcgtcaaataattaagaacgatttctttgccctcttgatcaggccgcttgcttaggaacggacggtgctggaggatcggtttaaatgtcgccatcgtttcaccgaattccatcatcagttcatgatcgacataataggattgtctgcctgtcagcgtccgccacggaattaatttttccacattcgtcgtaaacggcgagtacctgcgccctcctttttctgaaccggtaaaggccggagaggtgatgaccgttttcggctgggctgtaatttgctcgaacgtaaagcattcttcctcgcgctcttccgccaggtctttcagctccagattggtaatgttttcaagtgattcccatgctttcacggcgacttttccatttgaggtggacgacagggttaaaatcgcttccgccgcctgcttcgcttcacttatattcgggcatcctttggcaacgctgtttgaatcggtttctcccagtctctgtttgagtgattcatattcatccgcaatcgaccagctcatcccttttgttccgctcggttttaaagccgtatgagggccgagcgcggtcattttatgaaaaatgtgtttgtaatcccgttcaacgacatggatgttcggcatcgtttttcccggaatggcttcacattcgcctttgctccagtcattgattttgccgaatggctgggccaattcctgcatggtgtcgtggaggagcggcgttgcgactacctctttcaccggctccatatcgacttcttccgccagatcggaaacggcttttgacagcgccttaaaaatatcccagtctgacttcgattcccacggcgccgagatggccggagcaaatggatgaataaacggatgcatatccgtactgctgagatcgtgtttttcataccatgtcgccgccggcagcacgatatcggaatacagcgccgtacccgccattcgaaaatcaagattgattaacaagtcgagcttgccttccggcgcctgctcccgccatttgatttcttcagggcggatgctgtcgctgtcgtcattcatcagaccgttcgtcgtccccagcagatgcttgagaaaatattcatgccctttccctgagcttgagatcagatttgcccgccatacgaagagattccttgggaaattcacttcattgtcagggtcttcaatcgcgaatttcagttttttctcttgaagccgtgaggccacgtacgcacctacgtcttcaggtgccgccgcccccgctttctcagcttctttgtacagatcaatgccgttttgattgaatgtcgggtaagacggaagccaccctaatcgcgccgccagcacattgtaatcggcgtgatgcttgtagcgggatgacgcggcgatcggtgaagccaagtcactgatcggctggtcttcataacgccactggtctgtcgcaaagtaaaaaaatgaggtgccgttttgcagtttaggcacgccttcccagtcctttgcggttgcaatcgtctgccacccttcagccggacggagcttttcctgccccacgtaatgggcccagcctccgccgtttacgccttgggcgcctacgagtaaaacaagatttaacaccgcacggtaaattgtgtcggagttgaaccagtggttgatccccgcccctacgataatcatggatctgccgtctgtatcaatcgcattttgggcaaactccctggcaatctgtataacggcttctcttttaattcccgtgatctgttcctgccaggcaggtgtgaacggacggggatcatcataggatgcggctgattgtccgccgatgccccggttcacgccgtagttggccaatatcaagtcaaacacggtcgtgacgtacgtttcttcaccattcagatccaattttttaataggaagattccgctcaagcactttgtttccgtcatttgaaaaatacggaatgcgcaccatgccgatttcgtcctctattccgagcacggagagacgcggttcaatcggttccccggtgtcttcgtcgatcatatgcagattccatttctgctgcccgtcccagcgggagcccattgtgccttgcggtatggcaaacgcacctgtctgttcattccagaccgccggcttccactgatcattttttgtctgccgcccgatgtctttcgcatgcagaaaccgcccggctgtatacacgccgttctcttttgacagagtgacgaagaatggaaaatcggtgtattgcttcgcgtactcaataaaacgttcagtttcttggttcacgtaaaattcctgcaaaatgacgtgacccatcgccatcgcaagcgccccgtcagtcccttggcggatactcagccagtcatctgcgaactttgaggattccgcaaaatccgggctgattgaaatgaccttggcgcctttatagcgggcttccgccagaaaatgcgcatcaggcgttctcgttaacggaacgttggagccccatgtgatgatatagcctgaattgtaccaatcactgctctccggaacgtccgtctggtcgccccaaatttgcggggacgccggcggaagatccgcataccagtcataaaaactgagcattgggccgccgattaacgacatgaatcgcgagcctgacgcatggctgatcatggacatcgccggaatcggagaaaaaccgacattccggtcaggcccgtatttcatcactgtatacagcagagaggctgaaatcagcttcagcacttccggccattccgcgcggacaaagccgcctttccctcttgcctgtttataggacttcgctttttcaggattttcaacgatcgatttccaggcatccagcggattttgatgtgcctgcaatgcttcccgccacaaattgatcagcacacctcgcacatatggatatttcacacggagcgggctgtagatgtaccaagaaaaactggccccccgcgggcagcctctcggttcgaaatcaggcatatccgggcctgttgatggataattcaagttttgtccttcccacgtgacaattccgtttttcacataaatattccagctgcaagaacccgtacagttgacgccgtgggtggagcgaacgactttgtcgtactgccatctgtttctatatacattctcccaatcacgatcttcgcttgtcgtttggctatgatgatttgaatgatgttcgataggagaaaaatagtttaatctcctgagcaacggactcattttctttttcttcatgatcgttcactccttccgagtcaggtgatgctatgtacactataaacagagacggcgcatcaccttgtgaactatgtcacacactctgcttttttcacaaaacgttcacacagagcagcaggaaggattttcaaacgatatggggacgcccgcgtcatcaaaaaaaccggttctgtttaagaaccgggttcggcgttttcatcccgtgatgtatgcagataccgcaaaaacaactgataggaacagaagacattttgctgaagcatcgccaaaaagttcatttgcagccgcggatggtaagacatcatttgcttaaatacggaatatggaatatgaagtacaagaatatccggtgaggcattgactgagataaaaggcgataaatagagcccgcctttttcatcaatcggaaacacatcgcctttttcccacagcgcaacggtttgcgacccttcagggagcctgctgtccgtaaaacggatattgccttttaatacaatataaacggattgtgaatgaagaaaggatggagattggtcagatgagccgcggataaacgtcccgtttttcagcaaggtttcgacaatggacagaggcacttcattaaacataggaagttgtttcagaaataataaatagtcacactgattcataggaaagcctcctgtgctaaggatagctttagtgtagcccgattgaggccgcgcggcagtgatgtatttcacagcttgtatgataaaagtcacttatcaggagagtgtctgcatttataatgaaataaaaaggagggtttcgatgaaggcgatgattccgaagcagcacggcgcatgggcgatgctgctgattccatttttactcggcatggtcaagggtggcccggttttctggcatattccgctctttttgggctggctgttcctttacttgacggtttatcccgtttctctcgctttgaaaaagaaacagcttcagccctatcaaaagtggatatggtattacggttttccggcctgctgctttttgatcatttctgtctttcataagccgcagctcgtctggatcggcgtttttttattgccgctgtttctcatacatacgcattatgcccgccgaaaaaacgagcgggcgctcacgaatgatattgcgggtgttctgttcttttgttcaggcgggcttgcgagctgctggctgggaactggaacccttgacggctgggcttggtttctattcttgcaatccgctttattttttgtcgggagttctttttatgtgaaatcggtcatccgggagagaaaaaacagaacctttgcatactggtcgtggggatatcacctcttgctcccctttttatcggctcttctcggggcaggctgggcgtttctcgcttttatcccaagcagtctgcgggcctggttttttcacggaagagactggccggtgaaaacgatcggcattctggaaatcgtaaatgccggcttctttcttgccgtcatgtgcctgtttatcacaaggtaaaaaaacaaggacaccgctgtccttgtttttttcagtcaatattgcagatctcaagcggacaattttcacactcgatctcacatcgtaaatagtcccgcttgtgcaaaataatttttccggtttcgtctatcgatataaccccttgtttgcggaggtctcccagcatgcggttgacgctctcccttgccgccgcgcaaaacttagccaaatcctgatttgtcagcacaatgttaatcagaatcccgtcgcttcgttccaccccgtagctgtttgataagcggataagggtggaatagagcgccccctttttgccgtgaagaagcaggtccctgatcttggactggatttttcgaagatgggtgctcatccatttcataaattcaaacgtcaaaacaccgttttggatcaattccttttccagcttgtttttattaatgacgagcacctcgccatcctctaacactttcgcactgagcatatatctcggctcatctgtgaatagcgtcaattccccgacaatatcgtttttttggcagattctaagcgtcaggtcttttccgtcagatgtcagcttgccgatttcaatgagtcctgactgaatcagataaagctcttttgcttccattccttcttgaaacaaataagtgtgttttttcattttccttttcgtactgatcgattccagcaattcatgcagttcgcgggaaagaagttctttatcagattttcggacagagagaatattcatgagctcacctcgaagaaagtcacgttgcgtatgtatattgtaacgtgacttgatttgcactcacccagaaaaaactaacaatcttgtgaatggatcattatgaattgaggctctgactgtttctctccgtatgtgttttcattctttcctgccaatacatccagatcacaaggacaaagctggctaacgcgacctctgaaagcgccataaacccgatcgcgtattggcctgttgcctgaaatacacttgccagaatcagcggagggaaaaaaccgcccagtccgcccatagctgaaacaattccgttggcaatccccgcttgcttcgaaaaatagaaaggcaccagtttaaataccgtcccgtttccaatccctgagcagactgccaccgtcagcgatccaaacgcataaaggccgatcgtcggggagaatgacagcatgacccctgacagcgtaagccctgcgaaaacgaacatcagaatgcggagcgggctcagtttatctgcaagaaaccctcccacaggcctgagcagcgtagagaccgcaataaagccggccgtccgcagaccggcgtccgcagggctcagcccaaaatgctcaaccaaaaaattcggaagatagatggtaaaggcgacaaaggcgccgaacgtaataaaataaaacaggctcaacatccacagcacatgatttcggtaaacggctttcatttgtgtctttatggaaactttgactttcttctcatgccggtcgccgaacaaaacgtgcaataatgcgaaaacagccagcaaaacaagatacatctgcacggttgctttccatcccgcggcttgagcgataaccggcgccgcaaaggtagtaacggcggtcccgatgtttccggcaccgtaaatcccattgacgactccgtgcttttctttcggataatatttcgggagggacgtcactccgatggagaataccgctcccccgatccctaagaaaaagccgcccgcgattaaatcaaataaagaatccgcgatactgatccaaaatacaggaaacaaaagcaggatgaagctgatcataaacatcagccgcgccccgtacctgttcgttaaatatcctaaaggaatacggagaagcgatccgagaataacgggaatcgccgtcaccaatgaaatttcgcctttgcttaaatgaatatctgatgtcatttgagaaatgagcgatgaaatcagcacccacaccataaaccctgccactaagcttaatgactgcaacgataattgaatatgttgacgattaatcattcggcttgcccctttcactgattcaatatcagtcttatcatacaaaaactcagtgtgcgggattgtgaattacatcacacgctttatatgcaaaaaaaagaacaaagcccgaagactttgtcctttgatcatcattacattttttccggagcggatacgccgatcagctgaagcgcattgttcagcgtaatttgcgtcgctttcattaaagcgagacgcgcgcggctcttctctttattttccggatcgatgactttctccgcattgtagaagctgtgcagagcggaagccagatcataaatatagtttgtgacacggtgaggaatgcgtttttccgccgcttctgccactgcctcagggaagccgccgatcgttttcagcaggtcatattctttttctgattgaatatggctgaaatcaagatctgccgccggtttaagtccctgctcctccccttggcgaagcatgctgcaaatacgtgcatgtgcgtattgtgcataatacacagggttttcgttagatgtggatacggcaagatccaagtcaaaatccatgtgcgtatcagcgctgcgcatcgcgaagaaataacgcacggcatccaagccgacttcttcaatcaagtcgcgcatcgttacggctttccccgtacgtttgctcatcttcattttttcgccgtttttgtataaatgaacgagctgaatgatctcaacttccaatgtgcctttcttgtaaccgagcgcttcaattgccgctttcatacgcggaatatacccgtggtgatccgcgccccatacattgatgagcttgtcgaatccgcggtcaagtttgtctttatggtatgcgatatccggcagcaaataagtgtatgagccgtcttttttgatcagcacacggtctttatcgtcgccgaacgttgtggagcggaaccatgtcgcgccgtcctcttcgtatacatggcccttttcgcgaagcgcctcaagcgcctgatcaatttttccgttttcgtacagtgacgtttcagaataccatacgtcaaacggcacgcggaaattttccagatcggagcgaagtttatcaagctcgtactttaagccgtattcacggaaaaacgcctgacgttcgctctcctctccatgtacgaaacggtcgccgaaatcttcggcaagctttttcccgatggcgataatatcctcgccgcggtagccgtcttccggcatcggtttctcgagaccgagcgcttcaaaataacggacttcaacggaaagcgccaggttgttaatctggttgcccgcatcattaatatagtattcgcggctcacatcatagcccgctttagaaagaacgctgcacagcgcgtcacctaccgccgcgccgcgcgcatggcctaagtgaagatctcccgtcgggttggctgatacgaattcgacctgaatcttttcgccttgtccgatgtttgtctctccgtaatgttcacccgcttcaagcacggacgggatcagttttgttaagtagctgttgttcatgtaaaagttgataaagccaggtcccgcaatatccatcttttcaatggaagctttgcctttatcaaatgacgccacgatctcctcagcgatttggcgcggcgctttttttgcgattctcgccagctgcatcgccatgtttgtggaataatcaccgtgtgttttttctttcggcgtttctaacagtacgcttggaatctggctttcgtccgccaggcccgctttcagaacggccgctttgatttcttccttcagcacgtccttcatctgttccgcaatattcatgcctttgtttcctccttatattggatcgtcatgttatgtacatgttcttggttttcgcctacagtcatgttatatgtcattttgacggagccttccgaaccgccgacatcagcttgtatgtttttcgtttccgtacggagctccatttgtccgaacggcagtttatattgagtgagtgtcgatgcccccggaatgaaccgctgtttcatttggatggcgcccgatctcatcacgagaatctctttttctgtgatcttgacgaccgttttaatcttgcccaaatcatgctcttcgtgataggaaagatacgttttgccgtttctcacgtaatagaatccactcgatgtaaattcaaccgactcttcttctgagccgttgtgtatgaatgattgcacatgaatggctactggtgtctcctgtctcatgctgacacttccttttcatcatcccgcttaacctgaatagtataagttttcaagggaaaaagttcaaccgcttcctcctatcttaccatctttgctgattggttttgaagataaacatgatttttaaggaaaatgaaaaaaccggaaatcccggtctgcgggataaatgcggttccttcggcggacggctttgtcaacggggaaaagtttgcggtatttttgcgctatccttccgaatgaaaatgataaaatatgtcatatacataacgtggaagggagggattcggaatagtggcgagtgttttatcgtcttcagcggttggagaaaaaatcaacgaatggtatatgtacattcgaaggttcagcatcccggacgccgagtacttgcggagagaaatcaaagaagaacttgcaggcctggaagatgatcaggatcttcatctatactattctctcatggaattccgccacaatctgatgctcgaatacctcgaaccgctggaatcgcagcggatagaagaacagccgagactatcggatctgctcgcggatattgataaaaagcaggcccggctgaccggacgtcttgattattattttaattttttccgggggatgtatgagctggaatgccgtgaatatctttcagcgattcagttttttaagaaagctgaatataagcttgattttgtcaaagattgtatcgagaaagctgaattttattttaagatgtcagagtcctattattatatgaaacagacttatttttctatggattatgcccggcaggcttataaaatttatcataagcaggaggcatataatataagggtgcttcagtgccattcattgttcgctaccaactttcttgacttaaagcaatatgatgaagcaattcagcattttaaaaaagcttatgccatggcagaggcagaacagcagcctcaattaatgggccggactctatataatatcggactttgttttaacagccaagaaaattacaaaccagccattgactacataaaacgggcaatagctgtttttgaagatgggaacatcatcacttctctcccgcaagcctatttcttaatcacacaaatacattataaaatcggaaatatggccatagccagacaatatcatgacaaaggggtatcttatgcagaggaggcagaagattccctatatatcgccgagtatgaatttttagaatctttatatgtcggtgagcctgatgaagaagcaatcatggaatgttttgactttctcagagataaatcgatgtatgctgatcttgaagattttgccttagatgtggcaaaatattatcatgaaagagaaaatttcgagaaggcttccgcatattttttaaaggtggaagaaacaagacagcagattcaaggaggtgtgaagttgtatgaaattgaagtataaattagcacttacttgcttggcaataagcactgtttttgtttcagccgacatcgcaagtgcaccgaaacatcaatttgaagttgctcagcgcggaatgatttaaatgatgattacttttaggcttgcaggttaaactgcaagccgttttttatataaacaactaatttgcaaaaacaaaaagtataccttaaaattcaaatgtgtaaaaagtatttgacacacatacatatattatttaaaataaatatatataaatttgaaaatttaaaataaaaacaaaaatatttaaggagggttttagtggataacaatattaaaaaacttagaacagcagctgatatttcacaaaatgatctggctaagctctgcaatgtgaccaggcaaaccatcaatgcgattgaaaataataaatatgacccgactttaagtctggctttttcgatagctcacgcattaaatacgggaatagataaagtattcaactataacgccaaaaaaaagtaagggagcggttcttatgaagaaaatggatgagatgcaaaaacaccaatcgggtatagccgccagaatagcatttagtttttatactgtcgctttactgatatggtcattaatagattattttaaaaacggaaatacaggatggcaatttccaatacttttaataggctgcgcgctctatttatggattcaagtttatcataatcgaaaaacaaggtaacaattccaatacacttccggaggattatacagcaatgtacgaatataagttcataaaagtagaagtaaaccgatggaaaggaaagcctaaagaagactataaagaaattattgaaaagtattcgcagcaaggatggaagctggttcaaatatttgctcctcctatttcaggttatggggcagccgattattttgatattattcttgaaaaaaaagtataaatgtttcagtacaaagaaagccggatcatacatatggtccggctttctttgtactgaaaataagccagcagataccttaacggatttcacctcttaaatatttttttcggaaatccgcaattcaaatagctttcaatatattttattatttaacttgctggggatattgaaaaaattggaggaaaaaatgagtctacttttaaaaacacaaaatagtaaagcgatttttacattagtagcatcaggaatcattgttctcgctcttttcagtataaaacataatcatttaagcatggatgtcatcgatattttaaacagagctggaataatagctcctagttggattgtcagtgctatcaccgcaacgggttcagtcctggctatcattactgttttaggatctcttggtgcaggcttgccattagccgttttagaacaattggctgcagcaagtacagcagcagcttaatataaaacattaaattcaatatccctggcagtcccttaaacgaatggatgaaaatactttgtttaaaaagaacgttttagtcaaattgtacatactctgtctgatcttatttttaattgctttatttacagcttatttttatacagatcccgcttcaaatgtaaataatctaaatcgaaatatccgtccggatttttttcagattttctttaataatattaaagtagcgagtctgcttgtttttttaggcccgttgacgctgtcgcttggcacggttgctgttttaattattaatggattcattttagggaatgcgataggaaacatcaaagacaatttaaaccttttactgcttgttattccccatggaataattgaagtgccggtattgcttcttgcagcctctgtaggaatgaaattaactttggatttattactcctcaaaataaatttgaaattcacttttaaatatattggtattatatttctcggtttaatgatagcagctatgttagaaacatttcttacacctatctttataaaaggagtctcttaggattatgcaaattgaattatcttcatttaaggatcgaaacattaattttttgtcctcatttttgttttatattatcgggttagctttttatttaagttctctattgccttttatgaaaagtttaattcccaaaaacatccctatacaagttgttgagcaagtaaaacatttagattatatcattgcgatagccgcactgtttcttttaatgttcggggtgatttttgaaggatttgtactatttctcattataaattttcttggtgctcaaattaagattaaaaccttttattccctatttatgttttctaacatcccggtcgcaattaagttttttcttatatcattcaaaaacattttcgcagaacatccaaatactagtttatttttcacaagtaatcatttgattttttctatctttgatttgttcaatattgcctatttatttcttttgtttattcttctgaaatggagaacaagtttgaactacctgacaatctcagtttttatttttacggcattcctgtatagaatgtttttttagcatatataaataaaccccctcaataggggtttttctttcatttcgttcactgtatacaattccttttatatgcttccgaaacaatacccactctagtactcacattccactttttacagagaccggctatgatatattcgacattacgctgcgagtagtttaatgacttagcgatctctttattaggtttttcagcaattatcagtttaattacagaaatttcaatcttttttaattccaattcattttctactgctgttttcattctaacttcctttctaaaaatgtatttactaaataataccctattatataatttttatcaataacatcaattattaatagtaaaataatatagcttttactaacttctaagtagtttatatacaatataaaaatcccccgccatgtttcaagcgggggaaattctttctatttcacaaacccaagcagcatttcacgaatcatcttgcttgccgtgtttgcggtttgttctgagtggtcatagaccggcgcgacttctacgaggtcagcgccttttacgctgacttctgagcgcgcgatttcatggatggacgcgagcaattctttagacgtgatgcctcctgcgtcaaccgtgcccgttcccggcgcatgagcgggatcaagaacgtcgatatcgatggtgacataaacagggcgtcccgcaagctgcggcagcacttttttcagcggctcaagcacttcaaacttagaaatgtgcatgccgttttctttcgcccattcaaattcttccttcattccggaacggatgccgaatgaaaatacgttttgcggcccgatgagctcggccgctttgcggatcggagtagagtgggaaagcggttcgccttcataatccgtgcgcaggtcggtgtgcgcgtcaaaatgaatgatggcaaggtccggaaatttcttatacatggcttttatgacaggccatgatacaaggtgctcccctcccatgccgagcgggaactttcctttttctaaaatgctgtccacgtattcttcaatcatatcaaggcttctttgcggattgccgaacggaagcggaatgtcgccggcgtcaaagaaattcaaatcagctaagtcacggtcgagatacgggctgtattcttcaagaccgatagacacctcgcggattctccccgggccgaatcgtgaacccggacggtagctgaccgtccaatccatcggcatgccgtaaaggatggcgtccgcctctttccagtcggggcggcttgcgataaatacttttcctgaatatgcttcatcaaacctcatgataaaaccctcgctttcctgtaaaaaagcgcaagattcgctcctgcgccgtacgtttttatttgattaagtcgctcacaaatttcggaagaacaaatgccgctttgtgaagctctttcgtgtaatatttcgtgtcgatgtcaaagaaacggctgtcctccacttcaagcggatcgtactttttagaaccgatcgtaaatgtccacaggccgctcgggtacgtcgggatattagccgtatacaggcgggtgatcgggaagatttctttcacgtcacgctgaacgtttgtaatcagttccggtgtaaaccacgggttgtccgtctgcgcgacgaagatgccgtcttcttttaacgccttggaaattccggcatagaagccttttgagaacagattgacggccggtccgaccggttctgttgaatcaaccatgatgacgtcatactcattctctgatttcgcgatgtgcatgaaaccgtcatcgactctcacgccgacgcgcggatcatcaagcttgcccgcaatggacggaaggaattttttagagtattcaataaccttgccgtcaatgtcgacaagcgtcgctttttttacgcttgggtgcttcagaatctctctgatgacaccgccgtctccgccgccgacaacgaggacgttttccggattcgggtgcgtaaataacggaacgtgcgcaaccatttcatgatagacaaattcgtctttttcagaagtcatgaccattccgtctaagaacagcatgttgccgaattcttctgtctccaccatttccagatgctgaaattccgtctgttccgtatgtaatgtttgtttcacctttaatgtaatgccgaaattcttcgtctgcttctccgtataccaaagctcgctcaattgtcatctccctttcaaggcttatttcatttattgtaagcgtctgtatcgcttttattccggttaaaatctcattttcacctaaggaaaaagtatagaggatggaggggaaaaagtaaagaagtgtccggtttgatatgtttaaaaaacccccttttttcacataataatagaatcatgaaaaagggggttcccaaaagtggataaagtatctggaaaacagctcagaatcacattcaaaatcatccgcgcctgcatctttctgacactgatcggcggaatgctggccggcgtctgcttcacatccgttcttcttgcagcgaaatggcagggggccccctccgtccgggttcctcagtctacgattctttatgcaaatgacggctcaaagctaggtgagaccgatttcggggaaaagcgctactgggtgcggttaaaagatatcaatccgatagcggtgcaggccgccattgcggtggaggatcaaaacttttacaaccaccacggttttgattaccggcggatggccgccgccgcgctggctgacataaaggcaatggccaaggttcagggcgcaagcaccatcacccagcaatacgcgagaaatctctaccttgagcatgataagacatggaaacgaaaatggaacgaagcattttacacgatccgccttgaacagaactattctaaaaacgagattttagaaggttatgtaaatacgatatattacggccacggcgcatatggaattgaagccgcctcgcgcctgtatttcggcaaacacgccaaagatctgaacgatgcggaagccgtgcttttggcgggcataccgaaaggcccgtccggctattcgccatatgtcagcgaaaagaaggccaaacagcgccaggaaaccattctccgactgatgatcggccaaaaaatgatctcaaaagaaaaggcggaaaggcttaagaaaacgccgcttgcctatcagccgctgaaaaacaggaccgcagcgaaaacggcgccttatttttacgatgatgcgatgaaagaactcgagaaaaagctaggcatgacgcgcgaacagctggcaacgagcggattgcgtgtttatacgacgcttgataagcgcatgcagcggattgcggaaaacactgtggcacatacgatccgtaccggctctgacattcaggtcggcttttccgcgattgatccggcaacagggcgcgtgcttgcgcttctcggcggacgtgactacgaaaaaagcccgtttgaccgggcgacacaggcgaaacggcagccggcttccacgatcaagccgcttttgtactacaaagcgattcaaagcggctttacaccggtcacgctgatgaaaagcgaagccacagagttcaagattgacgacaacggagatacttattctccaagcaattacaacggctactacgccaataaaccgattacgctgcttcaggcgcttgcattatcagacaacatttatgccgtgaagacccatctctttctcggcatgaataagctcgtgtcggcggcaaaggaattcggcatcagcgaacatttaaagcctcttccgtctctggcgctcggaactgaacccgtgcgcccgattgagatggttaatgcctacgcgatgctcgcaaacgggggaaaacaaatcaccccttcctttatcacaaaagtgacggataccgccggcaacgtcttgtatgaacagccgcgcggacatcagcagacgcttgataaaaaagccgcttttgtgacggcgagcatgatgacgggcatgtttgatcaggatttaaacggctatacttccgtcacgggacgcaccatttcggaccggctgacccgaacctatggcggtaaatcaggcacgaccagcgcagacagctggatgatcggctttaacccggctcttgccgccggtgtatggacaggctatgacaaaagcagcacgattgattcagtagaggaaaaaagctatgcgaagacgatttgggcggactttatggagaaggcgctcgaaggagaaccggaaatagcgcttaaaccgccgaagggcgtcacgggcgtctatatcgatcccgcatccggctacacttccggacccggctgcgccgcaaagcattatacgtatttcatcgcaggcactgagcccgcggatgtgtgctacggaccggaaccttctaaaaaagaaaaggaacacgcccccgcccgcaaagaagctccgcgcaaaaagtggtgggacaagtggctcggcaaaaaagactgagcccggtgcattgcgcgccgggctttaatccgcgtcttcctcaagcacccatgggagcaagagtgaaaagtcgagatggataatagggtcaggaaaacccttcggtataaaaaatgttgtactcggcaatgaaaacgaaaagcggatatctcccgccctctcgatatgaaacttcggccagccttccctaagcctgccgacaatcggatagctgcccgcatagtgatgcaggccgttttcctttccatgctcccccaagtcgtgacagacagccggacgaatcccaaactgcgtaaacaatcttgttatctcggcgggaaggagattcaccgcctcggaaaagttccggcagctcccgcaatcgcaaggatcaggccatgatttttcgtattgttttctcgtttccgccgcatctgcttcaatgacccatggcccgatttcaaagacggtgaacatgatgaaacctccgcgtaaacatgaaaaaccccgagtcttggttcggctcgggactttccatgtcctgattctgtatcatcagtttactcagtacaatcgcataatagtgcaaatatttataaagttcacaaaaagttcacaaattatttttcttccggaagcagacctgttttcaattcatcggatgaacgttcccagagcccttggtcatgcttctgcagaaattcagcaagcacccgctttgagctggcgtccattttgtccacgataatgcagcgcttcattgatttatccattaaattcacatgctccggcaatgacttatagcctctgcggatacttctgtccacggtcatttcacaagccgtcacacccgcgtaataagggccttcttcttttctgtcgatggtgacccacacgagccagtacggttttccgttcggcacttcatctttgttcggcaggaatttgatgcctttttcaacgacactgcgggcatgcatggcgccgatgtcaacgaaggcttccttctcttccacatcgacaaataccggagaaatattgtcaaggctcagcgccccgacgccaaaaccgccatgtccgtcggtcggatcacttttaataatattaaatccgattgttttcttctttttttcttccatgaaaataccctcctacaaaagcggttgaaatataatggcaaataccttgagaatccagtctctcccctcgcttaacagcggccacacgacataggagccgaccggtgtcacaaacagcacgagaaacacgataatcccgtagctctcaaactgagtcattttggcgcgcacccgcggcggcacgagatcctcaataatccggtagccgtcaagcggaggaagcggcagcaggttgaataaacacagcgcgagattcagctgaatccaaatagagaaaaagcggtcaagccccatgctgaatgcagaaagcagctccattccgtaagcatgcatcaacactagcaaaaagaaaccgataaaggcaagaagcaggttgcttacaggcccggcgacggaaaccagcactcccgccagccgcggtcttttaaaggcgcggcggttcaccggcaccggacgggcccagccgaaacccgcgaccaaaattagaatcgttccgaaaacatcaagatgtttaatcggattgagcgttaatctgccctgcctcgccgcggtatcgtctccgaaccgatacgcgacatgcgcgtgcgccagttcatgcatcgtaaatgccacaatcagcgtaatcacgacatagggcataagctccagcggataatataaaaatctgtccaaatgtaaaaatccccttttttaaaaaatgcaagattgtccttcattcagtatactataagtgacctctcttccaaagtgaggaaacgataaaggaggatcagcaccatgccgctcgtaaccgttaaaatgcttgaaggccgcacagatgaacaaaaacggaatctggttgaaaaagtgacagaagccgtaaaagaaacgacaggcgcagccgaagaaaagatcattgtcatgattgaagaaatgagaaaggatcattacgccgtcgccggcaaacggatcagcgatacggagtaatccttgataatggccggcgctgctatgtcaggccggcttatttcattactttttcaacgaggctgaaaaaggtattcttttcttcttctgtcaatgcttcgaacagctcgtcaatgagcatctgccggttttcaatcatttgcatagccgccatttttcccgattcggaaagcgtcatccataccgtgcgtcggtcttcgttatttctcgacctttccacgaaaccctctttttctaaatgattcagagcggttgtcgtggcggaaggcgataatgtgacttcctgcaatatatctttaatcgtgcacgtgccgtgccggtaaataatcctaagaataaatcctctgatattgtttatactcttcggaattgtcgcctcatcaagctttttcgtgctctttaaatatttcgtgagcgcgtaatccagtacatttgcttgcaatatatcatgctccatgcagaaactccccatttcaagatgcatccatcatcatttgattgttttttattacattttactgatacctcgcggggaaagtcaaaatttcggccggaaagcccgcaacttttatcctgccttatacagactattatctcctactttttcacccatcccttttatgcaatgctggttttatagacatgattcaggtaaaatcattaagggtgactgcgtttgacggaaaggataatctgatcggatgcggcagacaatatgactggaaaagaaacggaacagacggggaaacagaacacaggattgtcgattacacagaagatgtgacacgggtaaaagccaaagagcccctcttggcttttgcttttggatggagggatgcgtgttgcggaatatcctacaaaaaaaagacatcacccagctgcttgaacaaagcagaaacaggcagactgccaaaacgatgggtggatttgatttaactttactgggcatcggcgccgtcatcgggacgggcgtcatggttcttacaggcattacggccgcgaaaaacgccggaccttccgtaatcttttcttttatcattgcagccgttgtctgcagccttgcagcattatgttacgccgaaatcgcttctgttctcccggtttacggaagcgcctatatttactcttacactaccatgggagaaattgtcggccatttaatgggctggacgctcttatccgtttatatggtgacggcgtcggcggtggcaagcggctggtcaagttattttaataatctgttagccgaaatcggcatgcctttgccggacagtctgctgcacgtgccgagccaggggggcatcgtcaaccttcctgccatcatcattactctattaattgccgtcgttctgtcacgcggctccaaggagagcaaaacctttaataatataatggttctcgtaaaaatcggaattgttttgctgtttatcatcacaggaagcttttttgtaaagccgggcaattggcatccttttatgccttttggaatcaaaggcgtcattacgggggcttctgccgtcttttttgcgtttctcggatttgacgcgatttccgcttcggctgaagaagtcaaaaaaccgcagcgcaacctgccgatcggtattatcggttcactggtgatctgtacattggtatacgtcatcgtctgtctcgtcatgacggggatggttccgtattcacagcttaatgtgccggaagccatgtcttatgtgttgcagtctgtcggacaaaacgcggtggcgggcgttatcgctgccggtgcggtgatcggactgatggccgtcgttcttgcccatacctatgcggcgacccgtatatcttttgcgatggcaagagacggaatgctgccgaaagtctttaccattgtcggaaagaaatcgggagcgccgatctttaatacgtggctgatcggactgatcagcgcatgcatcgcgggttttgtagatctgaaagagctgtcggatctctcaaacatcggcgcgctattgacatttgccatggtcagtctgtccgtgctgattctgcgccgcacccataaggatctgccgcggggatttaaagtgccttttgtacccgttctgccgattttggccattatctgctgtttgtttttaatggtcaatctgccgctgaaaacgtggctttattttgccgtctggctgatcatcggcgtcatcgtttactttttatattcgtacaagcacagcaaattgagacaataaacaaaaccaggcccgctttatcgcggcctggttttttcatcaaaaaagacgaaagccatcgcctttaacaaatgtgtttcagctcttctatgtagtgaagcgcctcatcatattcttcatccgtatatttctgtttgctttttatcgtaaacactttctctttcttttcctcagcttcaaggccgtcaaaatacaaaatcgtagacaccagctccagaaaccgggatgagcggctgttgacgctgtcgatgtacttcttcatatccggcatcgtaagctccgcatgatgtaaaaactcggctcccgtctccgtcagcgagtaccggtattgaaagtagccgccctttttttccttcacctcatccagaaacccaagattgcacagctcttcaattcgaagcgtcagttcttcggaatacgggccgtaaaaatgaaaatcatatttttcgtagaaaggatactgcattttcttcgcgatataaatgattttctgcagctttttccgcccgatgatttctccagaatccgagaacaccttcatcagttttgcatgttctttcaacaaattcccgacatctccttttccttctttaccaaaatccttctatgtcagtcccagcagctgccggatttttaattttgcttcagggttttctgaatcgtcacaaatgaggtccatcggatagtagagcttatggtccgtccggcgtttgcccgaaatggattcgacaatggcggactgcctggacagctctttgatctggccgttctgcgttaacaggtgaatcggcagacgctcctcctcttcacccggccggtaaaaatcatacggcagatccgatgaagaatcgaccactaaatagtaattgggatcaattcccgcctctttaaacagagcggtcagttcaaaataagccgacatttcctcattggggttaaattcggcatattgaaacagctggcggttaatgaagcggcggcacaagtcggacagaatcgggtcctcttcttcttcccaagcctggaaataatataaaatgatggcttcatcaagcttcagataatccgcaagcgtcagcttcccttcaaaaatggaataaaaatgaacgggagcatgagtgaatatatacccttcttcatggagctgcttcgcacggtggagaattttcgtcaaaatgacttcagcgcttctcgtcacgggatgaaaatacacctgccagtacatttgatagcggctcataatatagtcttcgacggcgtgcatgccgctttgcttaatgacgatttggtcctctcgcggacgcatcacccttaaaatccgttccatatcaaaatgtccgtagctgacgcccgtatagtatgcgtcccgctgaaggtaatccatcctgtcggcgtcaatctggctcgaaatcaggctgaccacctgtttgtttttgtatgttttggcaatgacttcggcaacatcctgcggaaatcccggtcccgcctttctgagaacctgattcacctcggtgtcgccgagaatgatttccctcgtatagtcttcatgatccagatgaaaaaccttttcaaaggaatgcgaaaacggcccatgtcccaaatcgtgcaaaagcgcggcgctgagacagagttcgcgttcattgtcatcccattcaggacgccctttaaaaacatcatcaaccattcgtctgacaatctcatagacgccgagagaatggttaaaacggctgtgttccgcgccgtgaaacgtcaaatacgtcgtaccgagctgtttgatccggcgcagccgctgaaattcacgggtgccgatcaaatcccagatcagcttgtcccgcacatgaacatagcggtgaacgggatctttaaacactttttcttctgataattttccgtttggatacgccatcgtcattccctcttttttttagccgtgattctattatatcggctctgtaatttgaaaacatccttgaatttgtccggcgttttgttccagttttccgtcattgattttttgaagcaaaaaagcctgacccatcgggcgaggctgtcgtaaaatacacatttactttttgatcttctttttcactttctcaatcagctcatcctcagtcggcgccgacagcgggcggttgtttacgaaagcaaacgattttttgcgtccgggcccgcaatatgactgacatccgacctccacttttgcatccgggtcagcttctttcaaacgcggcagcaaagtcttaatattggtggcctggcaatcatcacacactcggaattcattagccatgatgtacgcttcccttcattcaatgttcctctatgttaaatcttaattttaaaaacgaaaaaaatcacatcacatctcattgtacaaggattcatcttatcctgcaaggctctgcgtatctctcattctttcagccaatttgtataaatattttccaatctggacattctaataccatcaaagatattgggggttgagaacattgacaaaacaaagacaggacgcctggtcggaggaaaatgacctgctgcttgcggaaaccgtgcttcggcacgttcgggaaggaagcacgcagctgaacgcctttgaagaggtaggcgataaattaaacagaacgtcggcagcgtgcggtttcagatggaatgccgtcgtccgccatcaatacgaaaaagcgcttcagctcgccaaaaaacagcgcaaacagcggatgcgcgcgctcggaaacggccagccggcaaagaagaaactattatatcagccgcctgcgccggatgcggacatcatgcaggaaaccgcagccgaagagacggttcaaacggaagcgccaaaagaggatcggcaagccgtcatgtccggcgaacatatgccttatgtcgatgaaagcttcaaggaagagttagctagtttatcacatttgctggcgcctcagcagccgagccaaaaggcggagcttacaatggcagacgtcattcaatttctgcagagctatgaaggaagcggaaagcaaacttccgccctgcaaatggaaaatgaccgtttaaaacgggaaaaccaagaacttcagtctaaaaccgagcagctggaagcggccgtcgaaaagcttgaaaaagatcaaaaaaccattcaggaagactacgaaaccttggtgaaaattatgaacagagccagaaaactagttttatttgaagacgacgaacatgcctctccgtcctttaaaatggaccggaacggcaatttagaaaaaatggccgaataacggaaaaacccctttccttgtcatggaaaaaggggtttttaccatttgtcaatgacgcgcatcctgatctatattaatgtaaacattgttcaggaggccttcttcccgcaaaggctgcgcatctcggtccccgcccgcacataagcataaagattcaattcctcaccccaaatggttcttgggaattattgatcgattagctactgtgcaatacactgtatagagaatacaattattagatatgatgggaatgatagtaaatgagtagccaattacgaaaaggagcgttggaactttgtgtgttgtccctgcttctttatgaagatttatatggttatgaattaatcaagatcataagtgaaacgttccctgtatcggagggcaccatctaccccatattacgaagacttacaaaaaataactacctaaaaacgtatacagcagcttccgatcaaggcccgtcacgcaaatattacaaagtaacagaagaaggcgccttatatcatcacacattaaaatcggaatggcttgacctgtccgaaaaagtgaacagcatcattaaggagggaaaatgaatgtgtaaagaccaatatttaaaacatctccggcgggaaataaaagatctgccggaacttgagcaaaaagagatactcgccgatatcggcgaaatattccaaatgggcggcgctgaaggaaaaagcgatgaacaaatcgccggcaatttaggaaaccccaaaacacttgcgcgcgccttaaaagcggatattttcatcagtgatgccgaggagcagaaaacatggcgctcctttttcaaagcattcggcctgatgctgggtatgggcatgttcaacttcatgtttatgctgacaccgtttctttttgcctctgttgcggtgttaagtttgatggcaatcggcctgatgctgatgaccggatcattctttctccttgtaaaagcgccgcttgtaacagccatttttaacggatgtatggttcttggagcgggtatggcggtgtttatggccggatttgatctttcgaaactgatattccgcatctttttgcgctatttcaaatggaatgtcagcgttgtaaggagggaaaccattgaatcgaaaaatgtggtatagcattgctctcattttaatcgctgccggcctgatcggaagcatgttcttcggttttgacggcttttaccctaaatcataaggaaggtgtgcaaatatcatgactgaaccagccctgatattaaaagatgtctctaaaacaatcaatcatacccctattgtacagtcaatttctttcgatgtgagaaaaggcgagatattcggccttttagggccgaacggctcaggaaaaaccactattttcagaatgatcgtacagcttattaaaaaaacagaaggagccatttcattcagaggcagaccggacagcgactttgaatattttatgagacatatcggggttatcattgaaggcccggatatgtatccgaatatgaccgctttgcaaaacctaaaatattttactaaactgcgcagcacctcgctgcgaacggatgaccttatgaatacccttgcaaaagtcgggctagagcaggctgcccgcaaaaaagtgaaacatttctcattaggtatgaaacagcgcttggggctcgcttattctcttcttcacaatcccggattattaattctggatgaaccgatgaacggcctcgatcctaaaggaatgaaagaattgcgcaccattctttccgatttagcgaagcaaggggtttccattttattatcaagccatttattgtcggaaatggaggagatttgcgatagggttgcctatattaaaaagggacggattttaggaattgaagacatgaagaacagacatgaccttggtcagaaaaaactgtttaccgtcacggtcgatcatccggcaagggcgaaagaaatattagagcaggacggtattcttcaagtacagcaaaaagacagccgcatcattgaattggaagcggaagaagataccatcccgtatgtcattaaatctttggcagagaaagagattctgatttcccgcgtttctgcaagaactttgtcattggaagagaaatacatgatgattacagatcaggaggacgcggtatgagcatatttcatctggcgcagaacgaattcataaaaataacccggaaaaaaggcacacttttatctctttttttcctgtttctcatcgttttgctggccggccttattatgaatcatgagttagatgcttcctcggataacaattggaaagaacggcttctcgccgaaaaaaaacaggaagaaattgataaaccggctgaaacgacaggcgtttattattctgctgatgttaagaataaagactattatttggagcataacatcaacccctatgaatggaacggctggaggtttttcggcacggttacttcaaacgggcttgagattttcgtaagcttaaccgcgattttaaccgtcagcgggattgtttctaaagagtttgcccttggaacgattaagtttatcgctacaagcccgaaccgaagatggcggattttaacatcgaaatttctggcctcccttctgtttaccggtatgatttacttattttactgtgtgagctgtttgctgatcggcggcgtgttattcggtttttccaatgcttcatatccgctcgtctatactcatttaaatgacagtctgtataccatcagttcaatcaaagcatccggaatcattctgcttttgcgtttcatatcaattataagcattgtcaccattgcgttcactttgtcagtattgtgcaaaagccaggcgctctccctttgcttatcgattttactgctgtttgccggcagtatattgggcggaactgatttgcttgcccaatttacatggtataaatttacgctctttccgcatttaaatctcgttgcttatgtaaataaaagcgcgggtgatgcgatttcaacgttaaacatcccctattccgtgacggttatagcgatctactttcttatttgtttattgatttctttttccgtctttcaaaagagagacattacagcatagacagagaggcggcggcataatgagcggacggcaggaaatattgacggtccagcaatttgccgctgaccgcccctcgatccatcgctaatggattcaaataaccgaagctcccgctgcttcgctgctgaaagcgtagaaattcccccccttcccgtataaaaagcgcctcatcgaatcggagaaatttcataatggctgtgtattttgcaacggcgtcaatgtgatactttctgcactcggctaacattaaacctgaaaaagcaaagtctgatgttttgtaccattccgtgagaaaaggctgcaattcattcatttgcaaatatgtgacggcataaagggcatccgcctgttcttcctgcatgccgcccggtgccatgagcaaatcggcctcacgtttcatcccggtttctaagaacacgatcagttcttccggagtcaccgccccaaaataagcccctaacaccatgaggatcatagaggagggctctgatttcagttcctcttgtaaaccgcgggccatttgttcaagtccgttatgaaaaaagatgctttttgcggcatccatcctgcggtacacatgatacgcatacgcgaacaggaccggatggcattcgtgtgttttttctccgaaataacggtctaggaatagaataacttcttctgtatcctttctgctttcaaaatgatgacatgccgctaaaccgcaaaacaggtgcatgagatcatctgcttccatttcttccggctgcagctgaatgttcttccaaaaacccagcagccattcttctgttttttttatattaaaatgttccttgactatctgcatgttccacactccagattcagaatctcaatcgccggcagaagagccggcgcacaatgaatggatggattctcgttatttatatgatgaagagccgcttgacagccataaaaaaatggatcgatacacgattggataaataacatattgcacagctgtttcatttttcggctgccgagacaaaacacaagccatttttgaatggacaccttcaagccgggatgaagcagatgctctccctcattcaaatgaagaagacagtactcgacaaactccagctcgttttcagctgttcttttccatgcgtcatggagcaaaggctgaaacatcgaattcttgtaaaagcgcactttttcatggtcagttgacattcccagctcgctcagcaaaccgacgaattcggcgtatttaaaataaggccattctttttttataagatagccgttttgcaatccgtgacgtatgacctgatcatccgaatctattccctgcttctttttataagcttttgccgttaaatagatatgaatcaactcattgacaatggccgtgttacagtgaaacagatcttcccagcatgacttatcaacgaaagcggaggcaatcctttcagtatgttcttttacagcggaagaatggctcgtcttcctgtagtacttgcagaagccggcaaacagctgaatgctcttttgatccggaagcgattgttcagcaaaagataataaaaattggtctgtctcttcagctaatctattcaagttaatcgttcctttctgctctaagacaggcatgcgcggcaccagcggcgacaagtgttgtatgatagcaatgtttgaacacatcttctcttcgctgttcacctgtcaaaccgggtttatgttgataggtgatgctcgggacattcccctctttcattcggccctgatagattttattccaggctgcttcatagagcggtttatggttgtccttatccatgttgatatgtaaaaaagagctgcacatcaataattcactggtaatatctaaattctcaagacagatatagatcccgagaaatttcaggaccttttcttttaacgacggcagatgatactctttatctgtaagcgaagaacatcccatgtctgttatataaaaaatcgtatgagtgatgctgtacgcatcatgatccgtcatatatgtatttgggatatcctgaccagctgctgtgcagtgatataagtcagaaaaatccgttatttccgaggttacgcctgctctttgcagactgtacttcagatccattttccgaaagggaactttagcaaggctgcaatcaaaacgcgctgccgtgaatttttccagctcccatatcaccgaagcccgtgacgggtgatcagtcaaggtaagaaattcacccgcaatagccaatccggcgagaccgtccggatcaaaatgaataaattcttcaagctgatcattacggagcctttctgtaataaactccgttaaaacagcaacttccttatcatctgcctgatttctgatcaggtaattggtaagaaaaatgagttctataaatgttttaaggcgccacctgaaatcattcgctactttatgattcatatcaaaataatggatatttttaacaatccatgacagtgctccccgcttaatttctcttatatactcttgtgtcacactctcaccgcctcgtctcagatgtgtaggctccaaacagtgattatcctacttttgagcggctaaatcagagaaattcaaattcgggttttgattgtcttcttggctcggcactacaagcacccagccgctccaagcgaaagaattgcctgattgttccgcatctccggctaacaaatgtgtggggatcgtgattcttttttcttcttttatttttttaaagttcatatctccatctccttcagtttatagaattatttggaacctacataaatatattaatcaaataaggtatataatgtaaactagttttgatataacgattctttttcactataactaaatagtatataattaccaaaaacaaaaaaagcccggacttagtccaagctttcctgcgtgccgaacaccttctcattccgttccagcattcgggtcagatttttttcaaataccatttcctcttccggcgataatccggctgcatacaggcgtccgctgagttccttcagttcagtcaaaagcgccagcattaagtcttgcacggtaatgtccgtttgcagcaattcgcttaatgaagccatcgtttcgggccggatatcgggatatacgccttttgtatcgttgcttttgtcttttaaagcggcttgatagaaacgtctgatcagatcggcgcgttcgcttccgcttttatcggcgcagaggtaaatctgaaccgcggttccgccccgcaggcgtctttgtgagattcccgcgaattttcggccgccgatgctgagatcatagctgcccggacagtacgatcctttaatttcatatgcttcaatttcggcatggtgcggacgcagcatccgccgcaccagctctgtcatcgcctcgtagcctctgtcgatgtcgatgccttttttctcgtcttcaaaaataagcgagatattcaatacgccttcgtccagtacgacggcgaggcctccggaattgcggacaatgacacggtagccttcgtcctccagcaatttcacgccgtcctctaaaaacggcaggcgcgtgtcctgaatgccgagcacgatcgtccggtggtgcacccaagagcgtgccgtcgcaggcgattcccctttgcctacggaggcgcacagcgtatcatccattgcgaatgactgcttcgcatcaaaataagggccgaggctggattggtcaatgattctccagctcggctgcatcagtaaatcaatcggttgctttcccatctatattaaatccctttcgtcataggctttccatgcatttattatatcactccgcttgtgatgattgaaattggcttttcaaaagagcgatgaagatttctttgttttttgtgttctccataatggaagattggatgatagacagtttccgttttaaggagaatccttttatctcaagcacggaaatgctgccgtgaagcagatccttttgcagcacgctttttgacagaacggaaagacccattccgctgatcacggcttctttgacgccctggttgctgctgatcgtcatcatggatttcggccgcagtccgtttgattgaagcacgtggtctaaatattccctcgttcccgaacccttctccctcgtcacccacgcttgattttgcaattcggcagccgggatgttttttctgccggcgagcgggtgtccgttcggtgcggcaatgcacaattcatcctccataaacggctgaatgtccagctcgtttttccccgtatgcccttcaattaatccgatatcggcttgaagcatccgaaccgcttcgctgacctcctccgtgtttccgatcatgacgtccaggttcagctcgggatactcgtcatgaagctttgcgagaagcggcggcagaatatattcgccgatggtaaagctcgcggcgattttgagcttccctttgacataatgatgatgggcgtaaatttcggatttcgcctgttcgtacaaaaagaccatctgcttggcgcgctgatagagaatgtcccccgtcggcgtagtcgtaaagtgcttcggagagcggttcagcaaggcggtttgaaattctttctccaggtttttaatgtgaaggctgacgctcggctgagaaatcatcagcttctgcgccgcctttgtaaagtttttttcttccacgacggcaatgaatgttttcagttccccataatacaaaaagcatcgcctctaatcattatttttcctaatcgtttagatcatataaatatattttactaatgattaagaccgcagtaaagtggagttatcaagataatgggaagtgactgagatgaagatggtaaaaggtgtttcagttaccgcaggaattgcgtttgcggctttctatgtcagccgcctgccgtttttgcaaatgctcggaatgcttgtccttgcaatgctgatcggcatgctctggcgcgccgtattcggacagcgggcggcattagagccggggatcgcgttctcaagcaaatacttgctgaaagcaggcatcatcctgcttggcatgagactgaatctggcggatatctatcatgcgggctggcacgtatttgcaattgccgtctgctgtatgatgtttgcgggtgccgttgtatacggactgtcccggctgttccgtatagatcagacactcagcacgctgacagcctgcggcacagcgatctgcggggcggctgccattgccgcgatcgcgccgcagatcagatcaaatgaaaatgcagccgccatcagcgcggccgccgtttcgttattaggaaccgtttttactgttgtatattctcttgcttatcatggattgggcttttctcctgcggcttacggagccttttgcggggcaacgcttcacgaggtggcgcatgcggcggcggccggcagcgccggaggaaaagcagccgtcgagatggcggtgatcgtcaaactgacccgggtcgcgctgctcgtcccggccgcattcatgctcggaatgcgggcgcgccgcagcggaaagtcaaagacggcttctgccgcttcgctccccatcccttggtttatcttcggatttctcggaatgagcgccatccatacatcaggcgttatttcagcctcgttttccgcgtttcttgttcaagtgtcttatgttttcatcggcatggcgatggcgggtctcggtttgaaagtccatatatcggcgtttcgtcataacggctggcgggcgctcgcagcaggcttgatcggttctctctgtttgtccctgttcggctgggccgcagtgacgttttttctataaaaaaagccggccctcgtaaaggccggcttttgcggattacagcgcttgagcagccgtaattaacgcaagattgtagacgtcttccgcattacatcctctggaaagatcgtttacaggcatattcaatccttgcagaatcggtccgaccgcttcaaagccgcctaagcgctgagcgattttgtagccgatgtttcctgcttcaaggcttgggaatacaaatacattcgcgtctcctttaatgtcggagtccggcgcttttttctccgcgacagacggcacaaatgcagcgtcgaattggaattctccgtcaagcgtaagctcaggcgctttttccttcgcaattttcacggcttcagccactttgtccgtctcgtctgatttcgccgatccttttgtagagaagctgagcatggcaacgcgcgggtcaatgtcaaacatttgagccgtattggcgctttcaatggcgatttcggcaaggtcctggctgtcaggagaaatgttgatcgcgcaatcagcgaacacatactgctcgtcaccgcgggccatgatgaagacgcctgatgtttttttcacgccttcttttgttttgatgatttgcagtgcagggcgcaccgtatcagcagtagaatgtgcagctccgctgacaagtccgtctgcgagacctttgtagacaagcatcgtgccgaaatagttttcgtccagcaaagctttgcgggcctgttcttccgtcgctttgcctttgcggcgttctacgaaagcctgaacgagttcttccatgccttcatatgtatgcgggtcaaaaatgtccacgccgtcaagcgtaagatttaattctttcgcttttgcttgaatgtcttctttattgccgactacgatcggctttaataccttgttgcccgccaagttgttgaccgcaaccaggatacgttcgtccaacccttcaggaaatacgattttcacatcttttcctgcgactttttcttgtacttttgtaaataaatctgccacgatataccctcctctatgttgacaaaaaacgcttacttttacagcatactcttcttccagctaaattcaaataaccaacttctattatagcgctttcaaaaagaaatcttatttttctaactaatttaattgacggtttgtttcacggcttagtttctgacacaaggcttcggattattcaaggtttctccacagccgaaacggttaaactgtgatatagtgaaggcatcaatgtaatgaaaagatataggagtgaagatacatgagtgagcagcaaaaaacgaacgaagccgcccaaacgcttgacggctggtacgcgcttcacgatttccgcacaatggactggacgtcatggaagatgttatccagcgatgagcgcctgtcgattattcacgaatttacgggactgcttgaaaaatggggcgtcgcccaaaaagaaggcaaaggctcgcaaacgatctacagcatcgtcggacagaaagctgattttatgctgatgattcttcgcccgacaatggaagagctgaacgaaatcgagcttgaatttaacaaatcaaagcttgctgaatttacaatcccggcttattcttacgtgtccgtggttgagctgagcaactacctcgcaagcggagaaggcgatccgtatgaaaatccgcatgtccgcgcccgcctgtatcctgagctgccggaagcgaaatacgtctgcttctatccgatggataaaagaagaagcggcaatgacaactggtacatgctttctatggatgaacgcagaaacctgatgagaagccacggcttgatcggacggagctatgccggcaaagtcaaacagattatcacgggatctgtcggttttgacgattacgaatggggcgtcacgctcttcagcgatgatgtgcttcagttcaaaaaacttgtatacgaaatgcgctttgatgaagtcagcgcgcgctacggcgaattcggttcattttttgtcggaaaccgcttgtctctcgacacgcttccgaagtttttgcacgtgtaagacccacccgcctgtccggcgggttttttctttgtcagaatttaaataaaatttgctatttttatcatttttttttacgatgtaaaggagataccattttggtaaaggggtgcagacagttgtcaaaacgaaccgcgtttattatgggagccagtcaggggatcggcaaagcgatcgctctgaaactggcggacaatggctttcataccgtcattaattcacgagttcccgaaaatatcgaatcggtaaaagaagagatcctcgccaaacatccggatgcgggcgtcaccgttctggccggggatatgtcggaccagaagacaagagccggcatttttgaagagatcagatcacaatgcggacggcttgatgtattgatcaacaacattccgggcggctcgccggatacctttgaaaactgcgatatagaggatatgacaaatacctttacgaataaaacgatcgcctatatcgactctatgaaaacggccgcagcaatcatgaaacagcacgaattcggcagaatcattaatatcgtcggaaacctatggaaagaacccggcgccaatatgtttaccaacagcatgatgaacgccgctttaattaatgccagcaaaaacatcgccattcagcttgcgccttttcacattactgtcaactgtctgaatcccgggtttatcgccacagaccgttatcaccaattcgtgaagaatgtcatgaagcaaaacggcatttctaaagcggaagcggaagaacggattgcctcaggcgtcccgatgaagcgtgtcggaactgcggaagaaaccgcggcgctggctgcctttcttgcctctgaagaagcctcctatattaccggacagcaagtatcagccgacggcggcagcatgaaaagcatataataaaaacatcccgctctcagcgggatatttcttgtaatgaaggaaaggacaaaccgagcttttgaatccgcagcacgaattcccttaaatcaccctgttttgccaccattgatattctgacataacgctttccgccgctgccgaaaatctcgccgggcgtcacgacaacatgggcatgctccagcaaatagtccgaaaactggtgtgaagactcgaattcattcggaatttcagcccatacataaaatgtccctttcggtttttcaatgctccagcctaattccttttcacataacgccgtgaaaaagtcaatccgttctttatatgtgcgcttcagacgcccggtatgctcaggatttcctgacagcgccgccgctgccgcctgctgaagaccgccgaacatgccgacgaagacgtgatcctgaaactcattgaccgcctgaatgattttctcattccccacggcaaatgccattctccagcctgccatattgaaggttttcgaaaatgaataaagctccgcgccgaccgttttcgcttctttcgcctgaagaaagctggccgggttctgatcaaattcgaacgcgccgtatgcaaaatcgtgaataaggtggatgtcatgtttttttgcaaacgctgccgctttttcataaaacgcctgatccgcagtcgcgcccgtcgggttattcgggtaattcaaaaacatcagcttggcttttttcaggacggcgggatcaatccgctcaaaatccggcagatagccgttttccggatgaagcggcatctcatgcagctccgctctggccattgtaatgcccgataaatactcagggtagccgggattcgggactaaggcgatatcgccgggattcagcaggcattgcgtcaaaacgtacaaaccagctttccctccgccgaacagcgcgacttctgtctccggattgaccgataccccgtactctctctcataaaattccgcgatggcttctttcagaaacggatagcctctgaacgggccgtatccgtgatacgaaggattcagcgcagcctcccgcaatgtttcaacgatatgcggcggtgtggggagatcgggattcccctgcccgaggttaatgatctgggctcccgttttctccatctcttttaccttttgaaaaacgagcgaaaattcctgtttcggaagtgtcttgatgacgtcggacggtatgatttccatctgaaaggctccttataaatgaatttgctctgattcgttattccgttctgaaaaggatttattgaccagttttgtatgcagaaacagcccgctgaccaaaaggacgataaacgccatgatgactgccgcgtctacaatgttgatcagcatggaaccgacggcgatgcacaatccgatggaggcctccgccaccgaaaaaatccggccctgaatctggttcgccgcgttctcctgaactttgaccttcgccagcacttcaccgtattccattgcgataaagaaaagaatggcggcaatgactgacacggcgaaaatcggggtaaacaaaaacagcgcaagcgagacgatcgataacactgtaaaatacatcagccctttattgttgttaaagccccatttgctgacaagagcggcgccgataaagccgccgaagccgatacagaacgtcaggatgaaattgccgatttcaccgtcccctaaaaagcggctgacaatcgggaaatagctgtagacgacaccccacaaaagcgccatcgtaatcatcgtgaacatggcgtttaacacaaaagcatttgttttgatttccttcaggccttctttaaacgactgaaaagcttctctcacgttttctgactgaatcggcacgtattgaagcttaatgcggctgatgaaaaacgcggagacaagataggtcaccccgttaaacgcgacggcaagctccacagaaccgcctaacagaaaaagtccgccggctgcagcgccgacaataatcgaaatcgtcgtggcttttgcaaacaaagtgttgatatttttaatatccgcttctaaagacgacatgaccgcgagacgtgccgggttaaaaaacacgccgcttccgtaagaaacaaacagcagcgccagaaaaagcagcggatattcgcctttcgggagaaatgtcagccccaaaaagatgacacctctgatcacatccgtccacagcatgattttcaccctgtcgagccggtccacgagcacgcctaaaaacggctgaaacaccatcggaatactgcggaccgcgatgacgccggacgtcacccagtagtcgtgatagtatgtagacaaaatgagcagagccgggagaacgcaatagtctcccataaacgaaagcgcctgcccgaaaagcaaatacttagagttcggtttcagctgtttcataccggtaacgcatactttgcagtcagcttcgcctgctgctgaatttgtttgattgattcggccacgtcacccgaattgcttcctttcagctcgaacgccgcaatgctgttgaacgcttcgaacagccgcagatccacggatgtacccgcctcggccgccgagaaagaaacgatttcggtgtctccctttaagacgccgtcgggaatgtcaatgctttcaatgacgaaatcgacagccgtctcaggcagctggccgttttctttgaaatgctgaggatacaagtggcagtcggcaacatagcatggctcctgctccaataatcctttcggcagatcgacttcttttccgaaacagagaacatccaataacagctgcgccatatcgacgccgaagacctttttaatattcggaatcatgttccagcccgcaaatcgtgccgctgattcaatcagtccggcttcccggtttttcattaatttaatctctgtatgtgttgcgcagttttcgaggccgagtccttcattcgcctttttggctgcttcgacgattttccgcttcgcgtcatcatccaggatggacggcgtaatatgcgatgtctccgtgaatccgatttgcggtgttttatcatgaattgcgacagggaagtattctccgtcggccatgatgccttctatgctgatatagtcggaataaccgcttgtttcgtaccagtcgtcatactccccctgcaaaaattcttccgcgataaacggcgcttcaaacgtgaccgctttcggtacgttgatcgacttcaggtattcattgactctgttaaattcggcttctgccgtttccctctctttgatgagcgtcacgccgatggagctcgccagatatgtaggcttcagaatgagcggcgttccgatttcctgaagtgcggcgcggaaatcttccagcgtcgtcacccgtttgtttttgatagacttgacgccggcccggttgaaggcggctctcattttgtttttatctctggcattttcagcggcctgtacgcccgctccccgcaggccgagacgttcacacgcttttgccatcggagcgataaacagttcattgttggtcgtaatggcgtcaaccgcgaacatgccggccaccttgacgatttcttcgactacttcttcctcaggtttgtcatgatcttcatgagcccagtaaatcgaatcgggatgctcaaaatcagccagactcttaaaatagtctttatcttttatgaccgcgaccgagtatttttcaattaatgccgcatgagaggctgtaattgcaaaaggtctcggaataaagctgacgaggttgtatttttcggctgcgcttttgtaaaacatatgcggcgggcatcccccaaggtcagcgataaccaatactgtttttctctccatatgtaaacactccttctctattgtgcggtgtatccaccgtctgcggtgatcgcgcttccggtcatatagcttgataaatccgaggcgagaaacagcatgacgttcgctatttcttcaggcttgccgagtctcagcagcggattgactttcgctttttcttttttgatttcttcaagcgtgccttcgttgttttcaaggaacgacttttcattcaaaggtgtgtcaatgattcccgggcacacgcaattgacgcggatgttgtgtttggcgtaatcgacggccatcgaacgcgtcagctgcaatacgccgcctttagaggcgttatatgcgggaatgtcgggccatgcaacgactcctccgacggagcacgtgttaatgatgttgcccttgccgcttttgagcatatacttgagcgcgtgcttgctcataagaaacatgcccgtcagattgacgttgagcaccttgttccaatcgctcagctccatctcatgaatcggcgcgacaatttcgatgccggcgttattgattaacacgtccaatccgccgaacttgtccgccgctgaccggatggcgttttgacatgccggctcatctgtaatatccgtctgcacaaaatgcagcctgtcattgttttctttcctgatcatcgcttctccctgcgcctcatcaatatccgcgacgaccacattcgcctgctgattcagaaacgcctgaaccgcggcataaccgatgcctgatgcgccccctgtgatgaggacggttttatccgtcaggttcatgactctttcgcctctaattttttcgcttttgctctgttatagcgcggagggaaaaagatattgactgattttgaatctttttcaaatctgttgatggcgccgtgatcttctctcggatcgcagaaataagctgtgccgaatgtcatatccactttgcagccttcaatggtcatatcatagccgccgccgatgcagatgccgatctgttcattgcggtgtttatggaacggcatttctcccccgttgcccggaatgttggcaagcatgatttccacccagtcttccacgaagaacgtgacttccataccgggcaataagtctctcgttttaaaaatattcaaaaaataatcttcagggcttgtgtaggtttcaccggctttcaggcgtttaatatcaatggcgatcacttcttgatccgtctcatttcttgcgccgtgaggcacattaggaggcgcgatataggctgattccagcgctgtcatctttcttgtgacatctccgacagtcatggacagctccccggaaacgacaaggccgatttggacttccttatgctgatgcggttccacgtttgtatgcggcggaacgtaagaaagcagaacttccgtatctcctctgacggacgaatattgtcttactccgttatcccattctattaatttaggcgtcgggaaataaagttcctgcaaatcttgttcagttttcatcatgaatctctccttttccgaataatgaccagctcatgggaatgcttttaaatgttttgacaaagtgaaggccgtacttttgtctggccagctcatttgtcagcgcgatgtcggacaaaccgtccttcactcttttcgcggctgcgctcgttgagttcaccagatcaaacgtgacatctttacgggtaaaatacttaatcaaattgataggagacgggtgggatacgatgacagtctgatcaagcatgtcatccgtatattcaaaaccgggccggacagccaggccgtacatcggggtgtcgcacctgaaaatttgcagaagctgcagatccggtctcatgtagaagtgcttaatgccgtcatacgcgtgaggcacaattgtgtattccagcggactttgaagcgttttttcaatgcacgattcaaatgtatcatgcagtgataatttgctgttcaccccttggagaagggtgaaattggtgatgaagttttttgctgcgtactcactgcttgtcccttcaggaccgagcgtgttgatcgtaatcagtttagatattgaataagccttgcttttcgtttgaatgctattatccaatataatcatgagcaccaaccaatctgttaaattttaagtaaatattatccatagatgttcaagctgtcaatattatttgaaaatattgataattattcctatatattagaaaacaccctatgacatagggtgttaaaattaacatttataaaattatagaaactttattttatcgatacaatgattggtcggcctgatgctcatatttcccataccttctgtatgcgaaaacgctgaggacaaagccgatgagggtgacggccgcacagataaatccgacagctgcatatccgtatccgacatagaccggacccatgacagcagaacccaaggtgacggccaaattggacgccaggctgtaaaatgccatgattttgccccggcggctctgtgagcaatcacttaaaatggtgctgagcaaggtcaccgtcaggctttgcatcaatccccagacgaataacccgatgaccaaaaacggcattgatgacggcgcataggcgagacaggaaagccatatgctgatcacggccaatgccgcgatcaaagagcgcattttccccgccttatctgcgatttttccggtgaacacgctcatggaaaaaccgattccgtacaccatgatcagcagccctgaagctgtatttccccccggcagcacgcggtgaagataggtgccgagaaaggaatacatgccgtaaaaaccgatcatgttgcaaaaagtgatcgtgaggtatacagggacacggggcaccttcagcgcatcccggaaagtgcctgcctgccgtccgttttcctcttctgttttatccccatccgccgtgctgcggcgcgcctcaatgaaaatgagcgaagcaacgaggacagacatgagggcgaaaatccaaaacgtccaccgccaatttaaaacgccgccgataaaagagccgatcggaacgccgaaaatcaaagcgagcgaccagcttgacacgatcagacccatcaccttgccgcggtacgcataaggcacacggtcgccgaccaccgcataagctgtcggcacaaacgcacccgccgcaagcccggaaagcgccctgcccagaaagaagaaaaagagattgtgcgccagcgcgcagatcaccgtgccggccgtaaatataagcagccccgtcatcaggctgagttcccgggaatatttatctcccagcggaacgagaagcggcgcgccgataaaaatcatcactccgtaaagactgatggaaagcgccagcacactgacatccgagctgaaagcccgcgctaaatccggaagcagcggagaaatcaccagctcttcagaaccggcggcaaatacgcctaatgtcaaagcaagcgcgagacagatcggaaatcggcgtttcgtttcgatgtgatcggtttgtttgctgttcatgctctttgaacacctcttccgtaaaacttttctaccttttgttgttttatattttagcatccttatgtttcattttacatttcacatgaaaactaattcttattttttatttacattcagattttaaataaaatatttagtttgtattcaataaatgatataaaatacgccgtccggttatgctatagtgatagaatcatttgttaaggtgggggtcatggaatgaataacgctgattcaaaggccgcccgcgcaggcctcggcatggtactgattctcggaacgctcgcttcattcgggccgctttcgctcgatatgtatctgcccgctttgcctgaagtggcggccgatcttcatacgacagcgtcacttgcacagctgagcctgacgttttgtcttttggggctggcggtcgggcagatcgttgtcgggccgctcagtgatatgatcgggcgccggaagccgctcattctgtcattgctgctttatacgctgtcttctttattatgcgccttcagcccttctgtttcgtttttaattgtcatgaggtttattcaaggattcaccggggcggccggaatcgtcatcgcacgggcgtccgcacgcgatatgtattccggaaaagaattgacggcttttttctcattactgatgctcgtcaatggggcggcaccgattttagcgccgattacagggggatttatccttcagtttgccggctggaaaatcgtatttgtcgtgctggcggtgatcggctgtatcattactgccgccgtgcttacggcgttgcctgaatcactcccgccggaaaagcggacaagcggcggactccgggagacgctgatgacgtttcgcggcctgcttggcgaccggatgtttatgggatttgcgctcagccaggcatttgtgatgaccggcatgttcgcatatattgccgggtcgccgtttgtactgcaaaacatctacggcgtatcggcgcaaatgttcagcctgctgttcgccgtaaacggtgcgggaatcatatgcgcaacccaaatcaccggacggatggccaaaacacatgatgaacggaagctgtttgtctccgggcttttgatcgccgtcatcggaagcatcactttgcttttatcacttgcgtttggtttaggcctgacggcggtctgcatttctttattcatcattgtttcttctgtcgggatcgtcacgacgacagggttttctctggctatgcagaaacaggagaaaggcgcgggaagcgctgcggctcttctcggactcctgccctttatcggcggtgcggctgccgctccccttgtcgggattgccggagaagaaaatgcctggccgatggccgtcagcattttcggttttgagttctttgccgttctatcctatgtgctgtcggccaaacgaaaaacaaagtaaagcccgccgctttttgcggagggctttttttcttatccggcagcgcctttttccgaagaagcctgctcacgcttcaggcgttttttaataccgaagtgataatacgcgtaacagatgatcatcagcgggacgccgcagtacagaccgatacgctggtcggggataaagatgagactgattaagataagaccgtaaaccgaaaatccgagaatcggcacgatcggataaagaggtgttttaaatgccaggtcttcgagatttcctccttcagcgagaaagcgtctccggaaaacgaattgtgaagcgcagattgacatccacgcgacgacggtaatcataccggagatggaaatgagccacacatacaccgtttcagccgcgaatacacttgtcagcagggataaaccggagatagcgatggtgatggaaagagctttcagaggcacgccttttttcgtcagtttcgttaaggaagcgggacccatcttagtttttgatagggaccacatcattctggacgaagcgtacagcccggaattcgccaccgacagcatggcggtcagaatgacaaagttcatgatatcagccgcatagggaacgccgattttatccagcacagccacaaacgggctctcgatgacgcctgccgtttggtacggcaaaatggacacgagaacaaacatcgccagcacaaagaaaaacagcgtccgccatatgacgtttcggattgagcggggaagcgtcttttccggattttcgctttctcccgaggcgattccgaccagctcggtgccctggaatgaaaaattcaccatgacaagggtaaacagcacggcttgggcgccgttcgggaaaagccctttgtccgtcgtaaagtttgacagatacggagccgtctgcccgccgttaaaaccgacaaagccgaaaaccgcagcgcagccgagaataataaacaatacaatggccatgaccttaatgctggaaaaccaaaattccatttccgcaaaactccgcgcagacagcgcgttaatggaaaaaatgacgacgccgaatacaaggcaccacacccaaatcggaacggccggaaaccaccgctgcattaaaattcccgccgacgtcagttcaagccccactgtattggcccagctgaatgcgtacatccatccgatcgtaaaacccgtcgacggcccgagaaactttgcggcatacgcctgaaatgatcctgcgaccggcatggcgaccgcgagctcccccaaacaaagcatcaccagatacattaaaaatccgccgatcacataagccaatatcgcgccgatcggtcccgcttcactgatcgtaaaaccggagcccagaaaaagccccgtcccgatcacgccgccgagggcgatcataaacaaatgccggcccttcatcgtgcgctgcaattcagtttgattggtatctccctgcatatacatcccccttattccgttatgtcagccatttgtgcgtatgtctaatcggtagctgtgcaaaaggtgcattgtcgtctgctgaatgagttccggcagcacatggaatgtgtacggcttgtacacgcgttccgtccatttatggccgtcctttccgtatacccctatattgaccgacggaatattcaattccctgatttctttaaaaggaatcgtcccgatgacatcccagcccggaaaattatcggtaaaggcggagacctcctcgtctgtttcatgcagcgataaaaagcttccgtccgctaaataagggaaaaactttttaaagacgaatgtttctccggttgatgccgctgttttatcgaccgcttcttgaatgacatgctgcaaaagccggtcccgtgtgctttcttccttcagataattgtgcggaaggtaaggcggcgcatagaaaataatgaccttggctccctgctcaggatcgagtttttgcagttcctcgacggctttaaagcatctcatccgcagttcaagatgttcatatgtttgaaatgcctgcccgatacactgtgccgggtctatcccgcggcttctcagccttttcaggtaatcttccagactgtacacttgaacgttccatgacatctcttttttcggcaggctcgttctcccacagtattcgtcgtaataatcagataatttttgttctgtctctttgcaggcttcgtcagccacggcggtcagctgatccatgacttctttggcggttttctcgtaaataaaataattaaaatagacatagctgctgacggcggtctgcacgttatacgcttccttgttgtcacgctggtagaggcaggtcggcggaagcacaagctccccttcaatgttttccgccatatgaatattgttgtgaattcttctggtgatttctgacgcgatcaaattcggatcgatgccggacagcgtatcaccgacatgcacctcccgcccgtaaatcgcaaagcaaggcaaaagctttcctgccgcgcccgtgtagatgtaccttgtcgtgtcaccctcatacagcggggtgataaaatcgttattaatcgctgctaaataacgaagctgcttttcttgtttcagccgttttaattcagaaatgctggttaaaatgccggaatgctggctttcttcatcggggtttgccatgaacagaatatggcccggcagctgatcgcgccgttcagaaaagtgaagcagattggcgagatgaacggcaataccgctctgcatatcaaccgaaccccttccgaacatccactcgcctgagcgggcgtcccgctgcacatcccgatcaaattcatagtttgagaaatactccgcgagacggtcggaatcaaaagcgatatcttttaaagggccgaaatcctcgatgccgaccgtatcaagatgagcgtgataaatgaccgtattcaggctttcgccgtttccctcaataaatgcgaaaatatttttgcggccgtaagggtcctcaggaatcgcctgctcccacacatgtgacggattctcctgaaagtagggaaagctcttgatcatatctttgatatagtcggctttttttccttctcccaatgtgccgttgatgctgtttaacgccaccagtgatttcgtaatggcttctattttctcctccggaagcattttgctgagctgctgatacatattccatcctccttaccctcatatagagaaaatagcgcgactctctttttcatcgcgctatttccgaaagattaataggcttcagacgttgtttttgcctgcatatgaagaatcagatagtcaggtcctcctgcttttgaatcggttcctgacatattgaagcccccgaacggctggtatccgacaatcgctcccgtacatccgcggttgaagtatagattcccgacgtgaaaatcttcgcgggcgcgttcaatgtgcgcgcgggttttcgataacagagcgcccgtcagtccgtaatcggtattattggcaatctcaagcatatggtcgaaatcacgggcttttgagatcgcgacgaccggcccgaaaatttcctcctgcatcaggcgggcgttttcatcaacatccgcaaaaatggtcggctgaataaagtatccttttgaatcatcaccttcgcctcccgtcaggagttttccttctgttttgccgatttcgatataactcatgactttattataagatgcttcgtggatgactggccccatgtatgtatcaaaatcttccggacttccgacggtgagtgattttgttaaagcgacggctttttcaacaacttcatcataaacgtcctgatggatgaccgcacgggaaccggctgaacatttttggcctgagaatccgaaggcggaatacacgattgaggaagcggcaagatcaagatcagcatctctgtctacaagcaccgtatctttccctcccatttcggcaatgacccgtttcagccacttttggcccggctgtacttttgcggcgcgttcatagatgcggcatccgaccgcgcgggaacctgtaaacgacacaaatctcgtcttcgggtgctcaaccagatagtcgccgatttctcctccgtcgcccggtatgaattggagcacgccgtccggcaggcccgcttctttcatcacttcaacgaatttcgccgccacgacaggcgccgcatccgccggtttcagcagtatcgtgttgcctgttacgatggctgccgccgccgttcccgccataatcgcaagtgggaagttgaatggagaaatgacgattcccaccccaagcggctcatagtgatactgattatattctccgtcacggctctttacaggagaaccgtctttcagtttcagcatctgacgggcataatactctaaaaagtcgatcgcttccgccgtatcagcatccgcttccttccacggttttcccgcttctttcactagatacgcggagaattcgtgctttcttctgcggatgatcgccgccgctttaaacagcacattcgcgcggtgttccggccgtacttttttccatgtttgaaatgcctgcagcgcagcctgcatggccttttccgcaagttcttttccggcggccgatacagaaccgatcacttcttttttatctgccggattgacggaaatgatctttttatccgtttcaatcgcttcaccgttgatgataagcggataatgcttgccgagctgtgaattcacataagccagcgcttcctgaaacgattgtttatttgtctcttcctgaaaatttgtaaatggttcgtgtgcgtatgaaactgtcattagaattcctccccgtattttgtaatgtgtgctcacgctttatgaagatgcaagaagcataccagcatagcaatttgtgataaaaacaagaaaatttttgccgaaagcggacgaagcttgtccgaatctgtcagctgtaatctgaaaacgcaaagaaattttgcgatccgctatataactgatgcaaaatctctttgcggataacacttatacccagccgcggaaccgggccgcttcagccgactttctgatgcccgtcatataggcggctaaacgcatatcgactttgtgggtatgcgctgtctgataaatggattcaaacgaattcaccatgacgctgcgcagttttccggcgacttcctcctcagaccagtaaaaaccttgattattttgcacccattcaaaataagacaccgtcacgccgccggcgcttgccaaaatatccggcacgagaagcacgcctctttcattcagaattttcgtggcgtctatcgttgtcgggccgtttgccgcctccacaatgattgaggctttaatgtgatgggcgttttcagccgtaatctgattggagattgcggcgggcacgagaatatcacagtccttttccagcagctccctgttcgttatgacatccgagaagagattcgtcaccgtgccgaagctgtcccgcttatccagcaggtaatcaatgtcaaggccgtcagggtcatacaaagcgccgtgggcgtctgagatgccgatcaccttggcaccggcgtcatgcataaatttagcgagaaagctccccgcatttccgaacccctgaatgatgatccgcgcattttccaatggaatcccttttttcttaacggcttcctcaatacaaatcgtgacgccttgcgcggtcgccgtctcccgcccctgtgaaccgccgagaacgatcggtttgcccgtaatgaatcccggcgaatcaaattctctcaggcggctgtactcgtccatcatccatgccataatctgcgagttggtatatacgtcgggagccggaatatcctttgtcggaccgacgatctggctgatcgcacgcacatatccgcggctcagccgttccagctctccgaatgacatcgtccgcggatcacagatgatgccgccttttccgcccccgtaaggaagatttgtgatgccgcattttaaagtcatccagatggaaagcgccttaacctcttcttcactgacttccggatgaaaccgcacgcccccttttgtcgggccgactgcgtcattatgctgtgagcggtagcccgtgaaaacctgtactgagccattgtccattttgacagggatgcggacggtcaaaagccgcatcggctctttcatcagttcatacatattgtcagggtaccccagttttcgcagggcctcttttatgatcgattgtgttgacaagaacaaattaagaacttctttttcttcatctttctgattgcttttagaaatcgggttggctgacatgttttatcacctcatcgtattttacgtgtaagcttcaattaccggcagaacaaaatgtaagcgcttttacaccaaaacccatcaatccctttcacattgtcgttacgccctttttatatgcaagattcatgccaggttttttgcgcataaaaaaaagaggctgttgtcagcctctttcatcctggattaacgcgggtcaataaccagctttgtttcggcataaagactgccggcccccaaaccgtttacgtaatcgcctttaattgtatacgcgcccgcgcgcggaaggtttttacgcaccaggacgagattgtattcagacgcgcccaataagtcaagggtaagcggaagtctgaccgtttttccgtagttgagaatttgcgtttctttcagtgttcttccgtttacagagtccctcacagtggcgttgaacccgtcaggaaattgaaattcaacggcgccgacggcaagcagcgcattcggcttgtatgtgacttcaatatcagacgtcgcgtattctttcgtactattgacggttttcgcttcaataacggcagattgggcgttcgcatgaaaagatggcaagaacacagatgaaaatactgcagcactgatgagaaaggccgaaaatgattttctttttaacatcatgaattcctccagatcatatgggattcagagcgtcctctgccggaaaagcgtgtctgatggttccattcgcgaattgggtttctcttttcctgagaataatctaccacctttatccatggaagtaaattattttttggaatattctatcatttatttttcacgagatgaatcagcacaaaaaacgaagacatccgctgtcttcgtcttgtgcgctatcggtgagccgtctgccagtcaaatccgatggtttcatcattccacgggattcttttttcgtcaggctgatccggattgtaggacattgtcgtgaaataaataatggtcagcggggtttcgccaagcactctgtacccgtgtgcgacgcctttgggaatgagaaggagcatcggattgtcttctcccatgtagtagacatccgtttctcccttggttgcagactcttcgcgaaggtcatgcagcacgacctgggcgtggcccgtcggaaaaaaccataggtcatcctgtttctcatgatagtgaaacgctttaatgacgccgggatagcttttggaccaggaagcctgcccgaaacgctctaagagatgttcatcgtcacggacgagttctgagaaaaaaccccggtcatcgctgtgtttgatcagctttttgatctttacgccttcgatcacttgcactgtccctccctttgtaaataatcatgcagcgcttcccgccaatgcctcatgccgagcccctgccgttcaatcgactcaagactcaacaccgagtaagcggggcgcggcgtctcatttccgtattcctccgtcgtgacgggcagcacggcggcggttctgccgctttcttcaaaaatagccttggcaaattcataccagctgcacactccgctgtttgcggcgtggtataagcccggcggcctgtcaaacagaccgatcaccgtttcggctaaatcttttgtatacgtcggcgctccgacttgatcgttaacgacacgaacctgatcatgtgtatccgcaagcttcagcatcgtattgacaaagttgtgcccgccgctgccgtacacccacgatgttctgataatggtgtggtttttccccgttaaccggatcagttcttcgccgagttttttgctttttccgtaaatcgtgcccggatctgcgggatcatcggtctggtatggccgtgttcctttgccgctgaagacgtaatcggtgctgatgtgaatgaatttcgcgccggtgttttcagcctcaagcgcggcataataagcgccgattccgtttattaaatacgctttgtcgagctccgtttcacatttgtcaacggaggtgtatgccgccgtattgacgacgatatccggcttgtaatggctgaacgagtgccgtaccgaacgctggtcggatatgttcatcatcgcttttgtcaaggcgatcacttcatacccttcccgcttcagctggcggcataactcccgccccagctggccggccgctccggttactaataccttcgtcaatcggatccccttctttccgattagtcttggctgtctgtataccagcgaatggttcttctcattccttcttcaaatgtgacgtcctgccgccatcccagctcatttttcagctttgaagcattgatggcgtaacggcggtcatgcccttttctgtcttcgacatgagcaaaccgctcctcgacaccgagctccttcatgataaatgacgcaagctctttattcgtccgttcatttcctccgccgatattgtaaatgtcaccgagtgttcctttttccagcacgagcttaatggcgcggcaatgatcttcggcaaacagccagtctctgatctgcatcccgtcgccgtacagcggaaccggcgtgccgtttacggcatgcctgataatggtcggaatcattttctcgtgatgctggtacggcccgtaattgttgctgcatcttgtaatgatggcaggaagcttatgggttctcacgtaagacatgacgagcaggtctgagcttgccttgctggccgaatacggattgttcggagaaagcggcgtcgtctccgtaaaagctggatcatccggcgccaaatctccgtacacctcatctgtggaaatgtgaatcagcctgccggcttttccctgtaacaccgcgtccgccagtcggtatgtgcccatcacatttgttgtgataaacggctctgcctgatttatgcttctgtccacatgggattcagccgcaaaatgaatgacagcgtcatacatttgggaaaagactttgtcaatgtcctctttttcagaaatgtcacctttgataaaacggaaacggccgttcttttttaaggcttctatttcaagcggcctgcttgcatacgtgagattatccaggacggtaatctgcgcgtccgtttctttcagcatcatctttgtaaaggtaaggccgataaatccggcgccccctgtaattaaatatgattttggcatgattaatgctcctgtcctttctgtaatgcctgatgcgccaggcttccggcgaggtagagcgattcatgcgtgcccgcatccacccaccagcccgttaacacatcatacgtcagctcactgtgttcaatgtataaattattgacatccgtaatttccagttcgccgcgttttgaaggggaaatttgttcaatataggaaaacacttctgcgtcgtacatgtagatccctgtgacgcatagtctggtcggcggctgctccggcttttcaatgatcgacttgatccgtttgtttttctcatcaatctcggcgatgccgaagcgctccggatcgtccacttctttcagcagcactttcgctccttttccctgctttgcgaaacgctccgtataaggttttaatgaatcttcaaaaatattatctcccaaaagcagaacgaacggatcgcgcccggtaaaccgctttgcgtatgataaaccgtcggatatgccggaggcggctggctgaacctgatatgtgattgagacgccgagctcttctccggtttcgagaagtttatgaaattgcggaatatattctttttgcgtaatcagcaggatatctgtaatccccgcttcttccagcttcatgatcgaccagtaaatcatcggatatggaccgacagggagtaaatgcttattgaccgcttttgtcagcggcataaggcgtgagccggtgcctccggctaagataacacctttcacatgaacacttccttacgtgtggttttatcacaaatcataaagaatcgccgccgcccgtttgatgcccctgccgtcaaccagcggctttccgttttgatgaagtccggtccgcagcggataatcagcggccatgtcagacatatgccgtgcgagaacgtccgctgatatgccttcaccaaggccgaggtgaacggcggccccccgtgcggcgaattttcccgccgtctcagtttgatgctccacttgagaaagtacgatgcagggcacacctgtacaaatggtttcatataaagtgatcccgccggacacgacggccatatcagccctcgaaagaagcgcggccatgtcatttgtctgccttaccagctcggcataaggcatttgtgtaagatgcgcgcgcacgtcgttagcatgaggcgcggcgccgcccatgatgatgatcactcgttttcgatgaatgtcggggatgcggcggcatgcttccatcactttaaagacaagcttcttcgggtcgcttcctcctaatgaaaccaatatggtccggcattcttttctcagctgataaagctgtttggctttttcaaaacccggatgaagaatcatataatccgggccttcatataccgcggcgctgcccttttggaccgtccggcttttcagccctccgtaaatgccgtttataacggcatcgcataaatgaatgacatgttcccgtttttcttcaaataagacgatgcgtgccgatgaatgctttttgacttcctctaaccagtcacacggcatatcgagcagatcgaaaatgagaaggtcaggagcctgcctgtttatttcccggacaataaattccttctgtcccttgtcaggcttgatgatcacttcccattgatcagatgacagataagaagaagcctctttatttgtgcagaacgttattgagcaattgttcttaatggcaccggcaagcagcttcatccggaccgcgtgccccatgccgatgtcacggcccccgtccgcgaagatcaaaacccgcatgctaatcagcctctttttgccggatcatttgattaatggccctgagctccggatcactattcagcagatgaatcaattcttttgccggaatatcaggacgcgagcccgcttttacgtacagctcgcgggccagcctgtagtcctcttctgtatcgacggtcatccgcaagtgaggagcccggagttcctgcgggggctcaggaaagagaagccggtacctctcaggagattctcttattaaaagcgtgacatgctcctggtatttgtccgccagcgttttgtcggcattgatctccgttaaaaggcgcgcgtttaccgcctcgccgccgatgccgagcggtgtaccgcagatatacgtgtagtctgcgtgctgatctaaatgcgattgaatcagaaaatcaagcagcgaaggatcgacaaacgggttatcccccgtcagtctgactgcgatgtccggtttaacttgttcgatgacttgtgcaaaccggtcaagcacgcactgctcgctgccgcggtgcacacggtagttcttgctgatgcagtgcgcagacagaatgtcgtcggtcttgctgtcagacgaggcgacgatcagattatcccgcgattgatcataatacgcgctttgccgaacccttttgacaatcatatcgaggatcgtatacccgccgatcggtttcagcactttgccgggaagacgcccgcttcccatccgcgcctgaatgataaacaaaatgtcagtcatcatatgggctgcctttcgtcaaaaggtcatcccaagtgatgcccgtgtcagcggggatatccctgaccgcacgcgtcccgtcagttaaaagttcaaaatatctcggatggagcccctgcggtttttggccgggacgaaggacggcaaggttttccgccgtaaaacattcgcctttttgaatcggcgccgttgaaaaaatgcctctgtaagcgaaccttctgatatccccttcaatcggtgtcgtggttttatgggagcttcccgacagcacttccggcaccggagcctgatgcccctgccgcagctccgcttcaaccgagcggatcgccgcaaccatttcttttaattcatccggattgagggcgaaggagtgatcagcaccgggcaggtttttatcgatcgtaaaatgcttttcaatcagtttcgctccgagcctgacagccgcgcacggcacatcatacggatgggcgctgtgatcggagaaaccgatcactgcatccgggaatgcggcggcaagcatgggaatgacgctcagattgctgtattcaggcggcgcgggatatttcgccacacaatgcatgatcgcaatttctgtgttcccctcgccggtaatggtttgataagcctcctgaatatctgaaatatcagcgcccgcggtggagaagataatcggggtcttcagccccgcgacatatttcaataacggcagatggttcagctcgtaggaggcgattttaaaagctgaaggggaagtcgcatacagtaagtcggcagagccttcgtcacataccgtgcttaaaaacagcacgccttttttcttacaatattcaaggagcggttcgatccactcagcgggcatttccattgattgcactaaagaaaatatcgagacgtcttttcccgcagcggttttgtacaagccggggtctttctgatacattttgtcagcctgaaacatttggaacttgaccgcgtccgcgccggcctcactggccgcatctatcaattcaaacgcctggctcagttttccgtcatgattaattccggcttcggcgatgatgaatacgggcgaaccttcgccgattgacttcgttccgatttggcatgatgccatcagtccgcctccttcccgggccacacatgatagtagtaataggacgcatccgctttaaatcccattctttcatacaggcggatggctcttacattgtggagctgcgttcccgctgatacagtcttatgctgaaagcgcaatgattgttcaataatgtgcgccgctaaatggaatcccgctcctttcccttcaaagcccggctttaccgccatcagatcaaggacgaattcatcgcctttagacagcccctgaataaagcccacggtctctcccttatatgtggcggcgaattgtaacgaagctctgccttccgcgttattccgcgcccactcttcaaacaggcggtttgcactttcatagctgaggcggggatcttggtaatacctgctttttgtaaaagcgtcgcgggccagccggctgatcgcttccgtgtcgccgggtccggctactgtaatctcaaacggcggcgtactgttatatacacgcacaggactgacgagcttgagcagactccctacaaaataagcgttcggaagctgctgaacaacctgcatcgcgccgatatcttcagccggtattttaataaatataaaatcagtgccgtccgcccgccttgccgcgtaaaattcctgaaacagccttttgagctgtccggcgctgtttgcggctgcaagcttcacattgatgatattttttcgaaacaattgactttcccacgaagagttttcatataagatcacgccttgaaggctgttttcttccaataaacagagcgacgattcataggcttccggctgaatgcccttctgatgcaggaaggtatgaatcatgtcctgcgcaagattttccctcagtctgtacacctaatcagcccctttgacgatatccgtaacggctgcaatgacgtattcaacgtcttcatctgtcattgacggataaagagggagtgacacggtgcggtgataatacgctgcagcggccggaaagtcagtctccttatacccgtacgttttttgataatacggatggaacggaaccggaataaaatgaacacttgtgccgatattatattggtcttttaaagcagaaatcagatcgttccggctgatcccggcctcctgctcctctatttgaagaacatacagatgccatgcatgccgcccgtcatcactgacatgcgggatggtcagccctttcatgtgtctgaaggcgtcctggtagcggctcgcaatgtcggctcttctttgctgcatgctgtcaatccgtttcagctgatgaagcccaagcgctgcctgaagatcaaacatattcattttatagccgggcgtttcgacctcgtagtaccagcttccgtttgaagaatagcggttccacgcgcctttgctcatgccgtgaaggctgagcaccctgatctgatcggcaagcccgtcatcgtccgtcgtcagcatgccgccttcaccggttgccaggttttttgtcgcgtagaagctgaatgccgtcgcatcgccgattgatccgatcattttctgtttatacgtggtatacacggcatgtgcggcatcctctaagacaaataactgatgcttttcggcaatggccagaatctgatccatattacacgactggccggcgaaatgaacgggtacaatcgcctttgtccgcggggtgacggccgcctcaattttttcagggtccgcattcagcgtaagcggatcgatgtcaacaaacaccggaacggcgcctgtgtgcacgattgtattggccgttgaactgaacgtcacggcagacgtgatgacctcgtcgccgggaccgatccctttcgctttcagggccaaaaacaaagcggcggtacatgagttcagcgcgatcgcgtgctttgcccccgtccaggcggcaaaggctttttcaaacgcctctactttcggtccctttgaaagccagcccgattcaagcgtatcaataacctcctgaatttcgtccttcccgatcatgggcaatgaatagggaagaaaagctgatcttttttgcaccattttctttgcgctcctatcttttttatgaagggtcaacccgtctgaagctgactccggttttttcctgaagcacttggcataaagcggcaagcgaatcctgaaccgggtagttcgcggcgacaaaagcacggcgcgcctgttccgctttttgatattctgcggggctttcgcatatccggattaattcctgagcaagtgcctgcgggtcctcaaaaacaaattctccaagtgaatgataataagggtatcggcgggttcccgctgattttccgatcagcacgggcttttgaaacagcatcgcttcaagaccgaccgttgatgtctgtgtcaccgcagcgtcaacatacgggagaatatcatacagctccatctcttttttgatgattttgcctgctttatatttccgcagcacctgattgtaagcatccagcttgtttttgccgatttcccacggatgcggtttaataatgagctgcatgttcttttggccggcaagctcttcaagcactcccgtataaaattcatcagaaaacggctgtgtggcgatcagcaccgtccgctgtgacgggagaaaagaaagtttgcggtaaaacgtgtcctgatctatcggctctcttgagaaaatctcgtcgaaacggggatgccccgtgatgatgatttgttcatccctgcagccttttgctttataccactccgcttcataagccccgaatacggcctgatagtccgtaaatacgggcagaaacgcttcatctcccatgagcgctccgtgctgcagacagatgctgacggcgttttttttcgcggacatcagcgccagcacacggctgtaaatatcctccgtcgtgccgactacaacggcggaaatcttctcggccgtaaacaaaatatcaacagcgtcaatcgcttcaataaataacgggatgtctttatacaaacgttcctgaaattctctgtttccgaaagcgggatggctgtgaagctctttcagaatggaatgggctttttcaatataagggacggggttccctttttgccccattcccgtcagctccaatttgcagataacgggcagcccgtaatggtcaggcagactccatctggccagtactgctgtttttgccggatcaaactgacggtagtttccctcggtgaaccgaagatgatcgaaatgcagaatgacttttccgtttaccggtttctcatctgttttcttaatgttttgccttttttgatcataatatggctgtataccggcttcaggaatatggtgatcagccggaccgaaaagctctgggttctgctccatgctctcccgaagcgccggactgatatattgataaaaattactgatcaatgcgagcgggatgtctttgtagcgaagtgactgaaaaaggtcaatatactgccggtacagcacccaatagttcgctaagtatgccgacaagccctcacccctttccaagcttttttaatgattccctcagctcccggcacgtggtctgctgcggaaggctgttcacaaactcgtttttctccgccgcgaaaagctgataatggatggattgatcggtaatataattgatatcaagctcctcagaaatcgggtaaaacggataaaaatgattcactctccagaagaaacgggcgtcaccgatccggtaaaacgccgggctttcatcccaataggaaccgaatgccgatttgacctgttccagcacggaaaaccggtgcatgaccgaacaatggtcaatggcgcacggcgcgttccacacgatccgttcggcgggcctggccgtctccttcaccgtctctttccgctgattcagatgataggttttggaacttgaatacacgacggctttttccgggtcttcatcaagctctttcaccattttctcaagccgttccggcacatacgtgttgtcgtcggtcgcatacgtcacgtactcgccctccgccatttctattgcctgattaatcaaggcggcgtagcgtgttttttccgttctttctttgacgcccgatacatcgctttgataaaaccggacgcggtcatccgtgagaaaaggacgtatttccgccaatgtcgcttcatttgagttgtcatccataatgaacagctcaaagtccgtaaacgtctgagacagaatacttttaatagagcgggccacatagtcacttttgttatagctcgtcatgatcactgacactttaggcaactcgtcacccccttttcgcacctgaaactaccgctatcatatgttccttatgcggaagatgcgctaggaatacagactattatgtgaaaagtcagcattgcgcgcacaaaaaaagccggctctgatgtccggactcattggagcgtattttcttttttcgcataaatctttctttgggctcatatggtggaatagataaaaacagcagccgctctgtcggctgtctgatacttgtcaggaggtttcagcatcaagaggttttcatcaaaggaggaacaatatgaaaccgaaaaagaatcaatatcagcaaatgcaggggatggggatgggaatggatatgcaaggataccagccgcagctcgggcctaatccttatccgcagcctcagggccaaggatcacaaatgatgccgatgcagcagcaaatgacaatgccgatgcagcaaggccagcagagcttcggcggggggttccccggccagccgcagcagcagggcggcggcagctttcagattccgtcaggtccatcatcgtcacaaaacgttcccggcatgctgccgattgaagagtcatacattgaaaatattctgcggttgaaccggggcaaaacggcgacgatttatatgacatttgaaaacagcaaagaatggaattcaaagattttccgcggtgtgattcaggcggcgggacgtgaccatatcatcatcagcgatccgaaaacgggcactcgctatctgcttctgaccatttaccttgattacatcacgtttgatgaggaaatcgcttatacttatccgtactccatgtcttcttattctccgagataaatcagaaagccaatcgctcacttgacagaggattggctttttttctttataaatatttgacggccgcgacgataatcataatccaagagatgataaacgccacgccgccgagcggtgtaatcgcgccgagaatggaaatctgcgtcacgctcaatacgtacaggcttcctgaaaacagaacgatgcccgcaaacatcagccagcccgcaacagaaacactgcctgcgccagaaagcttttcggccaaaaacgcgacagccagaagaccgagcgcgtgatacatatgatattgcacgcctgtgtgccacacctgcaaatatttatcggggattttcccttcaagcccatgtgcgccgaaagcgcccagcgccacggccaataaagcgttaatcgcaccaagaataataaacactttcatctatttttctcccgccttttcgttaaagtttccaattcaatcataacccaacatcggcaaaattcaacgtccgccgtccgatgacacgagattgtcggattttttctttttgataagctggattcggtcaatcgctatcgccagcagcgtcccgagcacaagaccgttgcttaagagcgaaatcaggatcggatgcatccccgataacgcgctctccggcacaaacattacgccgacccccgtcaggagcgccagaccgataatggagcggattcgtttttgctccgctttctcataagagtcaaactccgtaaaggcgagaccggccatcgtggagaaaacgacgaagtttaccgcaaagccgaccggtgagggcagactcgcaaacgcattcataaatagcgggatcatactgatgatcacgacaaatacacttcccaaaagaaacggctttttcgaaggaagcttcgtcgtctcaataaaaccggccgcccctgaaatcggcacaggcgcaatgccccctgacagtccgctcaaaaggtggctgatcgaagccgcaaacccagccggacgctcacgccgcttcccgacggtgccgccgaattttttcaccgccgcttctacaacccggatgctcgcgagcatgttgacaatcaaaagcacggtaatgaagagtgatgtaataatcaggccgctgtcaaacacgggttttccaaacggaaaaagagccggcagctgaatcacgcggtccggtatttgaatcggtttggcagcgccgaagacggcgaataagatccatccgccggcaagcgaaaggagaatcgcatactgtcttaagaacgtaacattcgatcgggacatgatgaacatcgccgccgtcacaaccatggcgagcccgaatacaaggccgtcgacgctgttttttaaatagccgatgcccaaaaggcctttcacaatcggctgactcagctgcatgaccaacagcagcagatacacaccggtcacaaccggcgtaaacagcacggccagccgttcaatcactttaaaaaggctgaacaaaaagaaaaagacagcgcttaataacagcgccccctgcagcgcccgcagcgtctcgccgaatgtcgcgaacaccgtgccagtcagtccgccgtaaatcgtgtatacgccccaccataagcctgccgggctttcattaatcggcagacgatgtccctggagacattggatgaccgcggcgacgccaagcacaaaaaatgtgctctgaatcaatgcggcagaatcggcatggttcaagtgaaatgattgtgcgatggcgacaggaactacaatcgcagccgcaatcataaaagccgtccattgcaaacccccgagtatcagtttcaagtcaatcaacctctcctgttaaaaatcgaaaatggaatccccgtttccgtcttcctcacgttcgtctttcgcttttttctgatattggttcagcccggcgctgcccatcattttttcaagcagcagcgggtctgtcgaaggagacgcggaaggtttcggcgccgctttcggaatcggattctgcacaggcgccggagcggtgtgcgtctgagtgccgagcacgacatcacacagagagcggatggcggccgcgtgcattttgacctcctcggtgcgggtcgccgttttcgcctgcctcagttcttcttccatcttctgaatcaaagcagagatatgtatgttcatgagtaaatcctccagcagtaatttgtcttcttcctgcattttatcaaatttctgagcgaatcgcagaattgagtttgttattttttctgacggcataccgccctgaacgccaaaaaaggcgctttccgccaggcggaagcgcctcaaaaaaaccgtttattgcggcaggtcggggatgcaccaatcgatcggctgctcccccattttttcaagggcggcgtttgtacggaaaaacggtctgctcccgaaaaaaccgttccttgccgaaaacgggctcggatgagtcgattcaataataatgtgtttcgatgtgtcaatgcgctcttttttcatctgcgcgtgacgcccccataggataaagacaatcggcttctctctttcattcaccacatcaatgatgcggtcagtgagccgctcccatcccttgcctttgtgggaattggcctgaccgcggcgaaccgtaagcactgtgtttaacaaaagcactccctgcttcgcccagctgacgagcgatccgtggttcggtacggagcagccgatatcgtcctgaagctctatgaaaatattttttaaagacggcggctgtctgaccccgggctgaacggaaaaactaagcccgtgcgcctgtcctggcccgtgatacgggtcctgtccgagaatgaccgcttttacatcctcatagggcgtataatgcaaggcgttaaaaatatcatggctgtcaggataaatcgtttggctgctgtattcttgtttcagcatttctctcagctcttgataatacggtttgtcaaattcatctttcagctgattccaccagctgtcttttaaaagctgtttcaaactgtccgtcccccttatgaactgtgcagtctcgaatggacgggctttccgtcccacacaatgtcagtcggcgcctcccgcctcttcatgtccggctcttcaagaagaaccgcgaagtttttcgtcgggagctccccaagcccgtgcttttcgcttaaccggtctaagtaccgcttccgtttgcccccgagatccgcggactgattgccgcctccctcaaaaaacgcatatatgacgctcgcgcaaggaacacgcttcacacggtgctgtttcgcggcgcgcaaataaaagtcccagtcccaataattatggacatccggatcaaaataccctaacgtgtcatgcagagaacgtctgtacatgctgcctgacggaacgtacgtggaaaatacccgcatatccgcataatccgccgtataggcgaaaggctttcgtgacaccgggtatctcgtgccgccccgttcttcaaatgacacaatttccgcgtcagaatggacaaaatccgcatcagcaagtgcagccgccattctttccaaatggcccggcgtaatgaaatcatcatcatcgcacagcatgatgcaatcacccgacgcttttttcacacctgcgttccgcgcttccacatgtccgacattctgttctaaatcaataatctgaatcggcagatcgctgtacagctgcttcgcttgttcggccgattccccggcatcatttacaatgatcacttcataaggctttatggtctgcatggaaatcgactccagcagctcacacaaagccggaatccgattatacgtgactatgacaattgatatattcatgatccgctccttctgctttttctcatgttctattaaaacataaagcggcggagagatcaggggggatttttgatttcggcccattcagaaacaaatccaggtcatgcccgccagcaaaacgagaatgatcagaaggtctccccaaacagtgcataccgccttggcattaagtctgcccgcctccatggcgttccaaagttttgattgataaacaggcaccaacaccatcgcatagcttgtgcacaagcagccaaaagccggcgggacaagcgcagcgctgtcaaatcattcctccaagccttccgtattgtgatcgggagaaaatctaactataatgagatataaaacactgatggaggccattgatatgtcaatgcacaaagcacttactattgccggttctgattccagcggcggcgcgggaattcaggccgatttaaaaacatttcaagaaaaaaacgtatacggaatgacggctttgaccgtgatcgtagcgatggacccggagaacagctgggatcatcaagtatttccgatcgatgctgatacgattcgcgcacagctggcgacgattgttgacggaatcggcgtagacgccatgaaaacgggaatgctccctaccgtggagatcatagagcttgcggcgaaaacgattaaagaaaaacagctgaagaatgtcgttatcgatcctgtcatggtctgcaaaggagcgaacgaagtgctgtatccggagcatgccgaagcgcttcgcacccaattggcgcctctggcaaccgtcatcacgcccaacctgtttgaagcaagccagctgagcggtatggatgaattaaaaacggtggaagacatgaaagaagcggccaagaaaattcacgaactcggcgcgaaatatgtattgattacaggcggaggcaaattgaaacatgaaaaagcgatcgacgtgctgtatgacggagaaaccgcggaagtattagaaagcgaaatgattgatacaccttacacgcacggagccggatgcacattctccgccgccgtgacggcagaactggccaaaggcgctgaagtgaaggaagccatctatgcggcgaaagaatttatcaccgcggcaatcaaagaatccttcccgctgaaccaatacatcggaccgactaaacattcggcgatgcgtcttagcggaaaataaaataaatatccccctcatgatcgagggggattatttcatttttttcgcggatgaccgtaaaaacatctcaatcgattgcacaaacagcgcatattccttcatctgttcatatgtatgcatcagccgatcactccattcattgtgcggctcagccctcttgagcatgcgattcagctgaagcaatacttctttatattcttcccgcttatcttccacttgctctgcggctttgacaagtaaacatttcggcgtcatcttctgatttttcaaaactgagaaaacaactccttttattcctggaatcatagtctttcgtttgaagaatagcacagatggcataggtttcacataagaaaaaagaacgattttctacaaaagtgtccaaattgagccatttatttccatttttcctaccgaagtgacggttacgtcatcatttcccgggaaaggaaaatatctggcgctgaaaacctcttctccatcattcaaaaacaattcgatcgaggatgcatccagaaagagctgcacggaatccacctcgctgatggcgcagcttctcttttctttttcttctccgctgaaagcggtgcgctccagcacagccagcccctcttcctgatgaaatataaaccgggccgcgccccgaattgagatttcaaaaccggattcgcaagtgatgtcttccagcagcacttcagcccgggacgcatctttcaccggcaggcttacagacgagcactccaattgaagacggcgcttttgctcatccgtgcggcgtaatttcatttccggaagcggacgctgtatgattctgccgttggacagtgacagctgtctcggcatcgttaagcagtgaatccagtgatacgcatgtgtcggatgtttgtcctcctgctgatccggaacgcccatccacgcgaacagaattctccgtcccttatcatcttccagcgtctgcgccgcgtaaaaatcaaatcctctgtcaagctccgtaaattcaccgtgcttaaattctggcggctctgtatgcagcctgccgaggaaatagcccgcctggtgactgttatgatattttatcccgtcggcttcaagcccctgcggacatacgagcagcacgtcggttccgtcaagggaaaacaggtcgggacattcccacatatagccgaatgacccgagaccgccggagtccgcccccgcaatcgcaccgagaaacgtccaatccgtcaaattctccgatatgaacaatacagcgcttccggtgagcttttccgtctgcgcgccgagcaccatgtaatacgctccgtctttcttccaaaccttcggatcacggaaatgagcggtatagccttccgggagacgcgcgacgactccttttttttcaaatacgatcccgtcttcggatacggcgaggcattggtacgtttcccgattgccttctccgtcacggacattgcctgtgtacattaggcagaggcgcccgtctttttcgatggcgcttccggaataacagccgtttttgtcataccactcacccggcgcaagcgcgatttcttcctctttccactcaacgaaatccttcgtcgtcacatgcgcccaaaatttcgcgccgtgccccgtatgaaatggctgccattgaaaaaacaagtgatatacgccgttccattggatcacgccgttcggatcatttaaaagcccgaccggcggcataatatgatagttctggcggtatggatctgacgcggctgtttcttgccgcttctttttcgcttcctcagcctgcaggcgcagctcttgatccggtgtcctcatttgacggcctccttttctttagctcccataatataagcggcaataaacgccgagacagaggcgatgcccattccgatcagatagtttattagatttcctaaaccgagcggagccgtgatggcaatcatcggaattccggtcagaccgtaggcattggcggcgacaccggtcaccacgacataggctccgcccagcgctccgccgatcattcccgcgataaacggcttgcggtatcttaggttcacaccgaaaatgactggttcggttacgccgagaaaagcggaaaatgcggcaggcaaagcgatttctttcattttcgcttttttcgtcaggaaaaatacagccagtcccgccgcgccctgagcgacattcgccatcgaccagataggaaggatatagtttctgcccaaatcagcgatgaggccggcctcaatcgcatgaaagctgtgatgcacaccggtaagcacaataagcggataaagacctccgaaaagcagtccggcaacaatgcccgcatgatcatacacatacgtcagcgagacggtaatgcctgatccgatcgccctgccaagcggaccgattgcgataaaggtgataaatcctgtgacaatcaccgtgacaaacggcgtgaccaataaatcgaatgcgtgaggcacaatttttcgcgtgcccttttccactttgctcataatgtaaacggctaacagtacggggatgaccgtcccttggtagccgagcagcgcaatgtcgaagccgaagagctgcataaaatcaggcggtacatccgcaagcccccacggattcaaaagcgccggatggatcataattcccccgagcacggcaccgagaaaggcattaccgccaaattccttcgccgcgctgaacccgatgaatacgggcaggaagataaacgccgcgcttgaaaacatgtctagaagcttaaacagcgatgattgttcagacacccagtgaaaagccttcatcatgccgagcagccccattaaaagtccgcttgccacgatagccggaatgatgggaacgaatatgttagacagtgttttcgcaaatcttgcggctggattcagcttttttttcgctgcgtcctgatgtgtctcacgatcctcccgctccaaatcggcttcttttgaaaaagcgtcatacactttattcacgaggccggtgccgaatataatctgatattgccccgagctgctgaaagccccttttactccttctgtctcttcaatgccggcctggctgatcttctgttcatcttgaatgacgagcctgagccgtgtggcgcaatgtgtcgcgctgatgatatttgatttccctccgatgtgtttgataagctgttttgccgtttcttgataattcattatgtatccccctttctaaaatcaaaaaagacctaaaattcgccaacgaaaaaggtcagcatgatccctttttcatgtacgcaaattttaggtcttgcctgcattaccagtcacaatcccgccggattcagtttttttaatgcgctttcattctattccatgatagcgctttcgtcaatatgttttcaaaaaaaaagtctgtttctcgaaacagacgcgttattccgggtttttttgcagacgctggacatgcagcgtgatatagccggcctcggattccggcagttccaaatcatattcagtttttaaaaacgccgccagttcaagcgcacaccgataagcaaacggatactttttttggatgaaataaagcatctcctcgtccatggaatggagtgcttcatttgaatccaaccggctgaccgcataccgcaagtgcgtgacgaggcgctgataggaaatactgtcttcatccaccttctgttcgaaaaaggattcgatcttttcgatcatttctttgatcatggttgtatgcttcatcgccgaatacatgcttttggcatccgccttggcagtgtggatatgaagcgcgatataccccgcctcatcatcaggcaatgatataccgagggtttgtttcacgtgttcaaccgcccagcggccgatctcatattcttttttataaagcgccttaatttcatgaagcaatcggttatgcacctgaaggccgttttgaatcctttcgatcgcaaaggataaatggtccgccagcgcaatgtggatgtgatcgttcaaaggtgccgcaagctctccctccgcatggctgatgatatcttcagccgcctctatatgctcttcgggaagcgtttctaacacttgtttgaacttttcattttcgtcgtgcacgacaaatattttttcaattttatgcttttgaatcacatcattttttctcttttgaaaagcgattccgggacccattacgatcttttcccgtccgtcttcttttattaacgccgcattgttgtttaatactttgtctattctcaagaggttcgctcccgttcatatgtttagtgggattgtaccctctttttcatatgatgtaaaggtgccggacccgcgcgctcccgtttcggcaattctttgcggacaggcatccatcggtttttatccagcctgccgcgggccgatttcgtttcatcggtcaaatccgccgatcggacacggctcacaaacgaaaaagccccagccgtccgcttcgctttcttatgataagccgcttggtttccgtacacggcggctaatggatatcttccgttacccggcgccatccagttcatcagaaagaccatccacacccgtaaagatactagcaaacgtttcattgcaaatcatccctccgcttctttttgacagacagcttgttcgcaggcctgtttttctctccgctttaacggaaaaggcggccgatccttctccgctaaaaactagcgggtctagcaaccctatgactctatgatagacgcggccgggcgaattgtttgtcacaatatgagtgaaaaaacaaactagttttcagaagttttgttgaaagctgatggaaatgacctgaaaaatggaaaagccgataaaaaaagttatacacaccttatcccttggttaagcacagcttaaacacagtgtatatccacatatccacaaactcgatctatattttgtataggaacattcgttcccaacaatatatatacacaaatttattcagttatacacagaattctgtgtataactccctccttattcacagaccaatttccataaatgagtcatatgtcacaaggattattttgaattttcaagaaatatatactagatttctaatttagataaagaaaaagggggaaacacgattgaaaaaaggaatcatccgttatctgcttccggcttttgtcttatcctttaccttatccacaagttcacaggctgcgccggcttcaaaaccgcaaactcctgatcttgagaaggctgaggtgttcggtgacattgatatgaccaccggcaaacaaacgacagtcatcgtggagctgaaggaaaagtcactggcggaagcaaaggaactcggcaaagcacagacaaaaagcaagctgaaaagcgaacgctcaaaagtgaaaaagaaagcgctcaaaaccattaaacacggaaaaatcaacagggaatatgagcaagtgttttccggcttctccatgaaactcccggcaaatgaaatccccaaactgctgagtgatcaggatgtcaaagcggtttatccgaatgtcacctatcataccgatcagctcaaagataaagacatcaccctatctaaggatgccgtgtctccgcagatggatgacagcgcgccttatataggggcaaatgacgcgtggaagctcggctatacgggtaaaggcgtcaaggttgccattattgataccggtgtcgaatataaacaccctgacttaaagaaaaatttcggacaatataaaggatacgattttgtggataacgactacgatcctgaagaaacgccgtccggtgatccgagaggcgcgtcgactgaccacggaacccatgtcgcgggcacggtagcggcaaacggaacgattaaaggcgtcgcacccgatgctacactccttgcctaccgtgtgctcggtccgggcggaagcggaacaacggagaacgtcatcgccggcatcgaacgcgccgtacaggacggagcggatgtcatgaacctttctctcggcaattctgtgaataacccagactgggcgacaagcacggcgcttgactgggcgatgtcagaaggcgtcacggccgttacatcaaacggaaacagcgggccgaacaattggaccgtcggctctccgggaacgtccagagaagccatctccgtcggagcgacccagctgccgctgaacgagtacgccgtctccttcggttcctattcctcagcgaaagtaatgggctacaacaaagaagatgacataaaagcactgaataaaaaagaaacagagctcatagaggcgggtatcggcgagcaaaaggattttgaaggcaaagatctgaaaggaaaagtcgctgtcgtcaaacggggcagcatcgcctttgtcgataaagccgacaacgccaaaaaagcgggcgcgatcggtatggttgtgtataacaatgccccgggagaaattgaagccaacgtaccgggcatgtcagtgccgacgattaagctttcatcagaagacggcgaaaaactcgtcagccaattaaaagcgggcggcacaaaagcgacattcaatttatccgtggctaaatcgctcactgaacaaatggcagacttttcgtcacgcggtccggttatggacacgtggatgattaaacctgacgtctccgctcccggcgtaaacatcgtcagcaccattccgacccatgatccggccgacccgtacggctacggatcgaagcagggaacgagcatggcttccccgcatgtagccggcgcagctgccgttatcaagcaggccaaaccgaaatggagcccggaacaaataaaagccgctctcatgaacaccgcggaaaccttaacggacgcggacggtgacgtatacccgcataatgcgcaaggcgccggaagcatcagaatcatgaaggcgatcaaagcagactcccttgtcgccccgggaagttattcttacggaacgtttatgaaagacaaaggcaatgaaacgaaaaaagaaacctttacgattgaaaaccaatcgtccatcagaaaatcatatcagctcgagtactctttcaacggcacgggcattaccgtttcgggcacagaccgggtcgtgatccccgctcatcaaaccggaaaggtcaatgcgaaagtaaaggtcaatgccaaaaaagtaaaggcaggcacctatgagggaaccgtcacagtgcgtgaaggcggaaaaacagtcgcaaaagtgccgacgctgctgattgtaaaagagccggactatccgcgcgtgacgtcaatcgacgtgcaggacggcacaacgcagggaacctaccaaattgaaacctatcttccggcgggagctgaagagcttgccttccttgtatatgacagtaatcttgactttgtcggccaagccggcatttataaaaagcaggataaaggctatcaatatttcgactggaacggcaaagtcaatggtgacaccgcactgccggcaggagaatattatatgctggcctatgccgcgaacaaagggaaatcaagccaggtgctgactgaaaaaccttttatcattgaataaccgaacaaccctgctggagcatcagcagggtttctttctgatcattcggcaaaagcttctcgaagcaggcggtatgactgaagtttatcttcaaaatgatgagtaatggttacagccatcacttcttctgttccgtatgctttactgagagccagaatctgttctttcacttgcagcttcgttccgatgatcattcgattccgattatcggcaattcgtctttgttcatacggtgtatacgtatttccgcggacggtttcgtaagacggtacgccgtgaagcggaatcccctgttcacccgcaagcagtgtataatccatgacagccgcgagttcctccgctttctcctccgtatccgcgcacagcacaaacaccgccacggccgtttttggttcttttcctaatagagaaggtttaaatctgcgcttatattgtgccgtcgtgctttctccgccttctccattaataaaatgggcaaacatatagcctgctcccgtttctgcgctcagaagcgcgctttcccccgatgaaccgagaagccagacttccggcgccgtcttaataaggggtgatgcggtcagattcggaaaacggtgattgtcatcagctgcatcatgcaaatacatcgccagctcacgaatctgctgcggatattgatcagcattccgcttcccgccgtcattcagcgcccatgatgcgatcggcattccgcccggcgctctccctaatccgagatcgattctgcccggcgtcaaaccttcaagcacgcggaaattctccgccaccttatatgcgctgtaatgcggaagcatgacaccgcctgatcctacacgaatctcattcgttttcgccgcaatatggctgatcagcacttcagggcttgaacccgccaaccgctctgaaaaatgatgctctgacacccaaaacctcttatatccgagcttttccgcctcctgcgccagtcttactgtattccgcagagcactttccgcagaactcccttctgatacaggagattgatctaatatgcttaatgaaatcatcactgtcacctcctcaacatcgtaccactgctaagccgttttttctttctgtatgcttataagcatccctgatgataaacatttatataccttgttccattttgtcgaaatatgttacacgtgaaacataaaaaaacctctcccggtcaggagaggttttttcttaattcttttgaaaacctttatcttttacatattgatttaaataggttctcggtttttgtttcatgaactgcaggatttgatcagaccacgtttcaacccgcttgccgtttgtccgtttatcataataagcggaaatggtttcatcatattccttcatataactgcggaagtgttcttcattcgtatcgtacgtgttttcatgatatacggcttgtttcggcaggcgcggcttttgaccggacggatgagcgggatgaccgactaccaagccgaacagcggcagcacatggtcaggtgttccaagcacttctgtcacctgatcaagttcatttcgaatgcctccgatataacaaatgccaagtcccattgattccgcggcaacacttacgttttgtgcggcaagtgcggcatcaatgacgctgaccataaacatttccgtattctcaagaagctcggtaatgttttcgcctttttcctcagcaagttttttatggcggtacaaatcagcgcagaacacaaacaagtgcccgttattttcgacgtaaggctggtttccggccagtgccgccagcttccgctttttctctttatcggttacaccgatgatggagtaagcctgcacgtaactggacgttgacgccgcctgggcgcttttcactaatgtatctatctcttctgctgtcagaagctcgtcagtaaatgatcggatcgaccgatgattaagtatagtttcgatggtattgttcatataaaagcctccttctttatatatcatatccgaaagggaatcatgtcaaaagcgaaatgctctaaacaaaaaaagacaacccgaaaaacgagccgtctcacattaagaattgaacaagtagcttttatatttcgtcagctgcacacttgcgttatatacgatcccgaagctgattaatgtagaaagcaccgagctccccccataactgacaaacagcagcggaataccggtaaccggcataatgccgatattcatcccgatattctggaaggtgtgaatcacgataagtgcagtaaatcctacgcaaaaaaacgcgccaaatcggttaaacgcatgcaagcggtcaatcagcaccacaagtctgtaaattaaaaagaaaaacatgacaaccgcaatggcgcagcctaaaaatccaaaactttcacccaaaatcgcaaagataaagtcggtctgtccctcaggtacgtacaccttcagattatgaacgccgtttccggtaatgccgcccgatccgatcgccataacggcctgatccacctgccagcttttatcgctctctgcctgagtcgttgccgcactggagtcagacatccacgatgtaatccggttaatttgataatccgcaatgccgattgaattcgccacatggggaaattcaatcacgagaactaagaaaaggccaagcacaagcgcggccgaaccgccgataatggtgatcagcttccagtttacacctgacataaacaccatcaccataacgataaacagacagatcgcacccgttccggcatcctgcaaaacgatcatcccgatcggaataaccgtccatgccgcaattttcaaaagcagattcacatcttccctaagtgacctttgatccttcgggcccgccttcgatataatggacgcgaccatcatcataattcctattttcgtaaactctgaaggttgaagagtgaagctgccgattttaaaccagctcttcgctccgtttttaatcggcgcgatggattccggcgccacacgcaaaaggagcagcgacagcacgccggcaattaacacgtacagactcagtttttcaagctgctctaaatcaaaatacatgatactgaccatgagaccggctccgatgacataaaagacgatctgtcttatccaggcatcacttccgtactgcccgaactgtccggccgcataaatcgccgcaacactaattattaaaaacacaccaaatataaaaatcaaatccccctgataatagggattttgctgtttcttatatcgactcattctatcccgccttacattttcatcggaagtcactattgtttattatacatgaacaccgttcaagaaaacatgatgaggttgcttcctttttattttttacggtttggggactacacgacatatgacgtgtcagaaaaggaaatgtttcggtcatgatgaaacttttccgataaaaaaccccttctcgtcagaaaaggggtttcagcctatgtttaacgtcataaacaagctgttcgggtcctctttataatgtgcaaacggattacaatattgaaacccggctttttcatacagacgtctggcggggagaaaagcctccatagaaccggtttccaagctgatccgctgatagccccgccgccttgcttcttcaatcatatggcggaggatccggttggctgcaccttttctgacatgatgccgagaggttttcattgatttgatctcaccgtgccggctgtttagctcctttaaggcaccgcagccgagcaggatgccgttttccctcgcactccaaaacgtaacgtcaggctgacgcagccggtccgcattgagcgcatgtatactttccggaggagaatgcatggtcatgctcttcagatgatcctgcaaaagcgcaatgacatccggcgctgtgacatcttctttccttacgtccacttcaaaccacccttgctgtgcatgtttctttgaccatagcaaaggttcatagcctgcgccattccattgtccggaaatgtgacagggtatttggcctttccggtttcttgtacctatccaaaaatgaggcaatagttgcaatacatttctcgaaaaagcggtatcaaaaattggaaaacatggtataataattgtaacaaaatgttcaaaaaacgaccacaaaacagacacattttattctctgtatttcattttggaaacgctcccataaaatgaaaggagacatgtaagatggacatgttttttgcttatttactggtcgcaagcgcaacacccctctttatctggctggataacaaaaaagtcgctctttcggccataccgccaattattctcatgtgggttttcttctacttttacgcaaccagcagcctatcccctctcggccacacacttatgatcatcctgttttccgtcaacgtcatcgttgcccatatcgccgcctttatcatttacggccttccgcgcctgcgccggagaagaagccaataaaggcacaaaaaaccctcttcgcctgaacgaagagggtttctttttattcctgatgttcggaatgatgctttgcaccgccaggagggtttccatccatatggtcaccgtgatggtagtgcgccgcaaagatccagatggaaccaaggatgataacaatcgctccgaaaaatccgaagagcgtgtttccgacttgaattccgccgttttcgctttctgtcatgtgcatgaacatgagaagctgaagaccggcttggataaatgcgaatccgaaaatgatccagagttttgctgatgggcttaattccgtatatactgcaacccaaagggccagcagggtcagaataatagacaacgcaaaacctacgatatgcttccacggaaagtggctgtgttcagcagatttgtttgccatattatagtccccccaatccgatgagatagacgcctgtaaagatgaagatccaaacaacgtctaagaagtgccagtataaacttgagataaagatttttgaagacgtctgcggcgttaatccgcgtttcttcaattgcagtaagatgccggcaatccagaagataccgatcgttacgtgcgttccgtgcgttcccagaaggacgaagaatccagaccagaaagcacttgtaccgagagatgctccttcatgtacatagtggatgaactcgttaagctcacatccgacgaagcccgcgccaagaagaagcgtaatgatcgtccaaatgacgacgccttttaaacttccgcgacgcatttcatgaacagcgatcccgcaggtgaaactgctgatcagaagcaggaatgtcatgatcatgacaagcttcacttcaaataattcagccggtaagactcctcctgctgttcttctttgaagaacgaagaaggttgcaaatagtgttgagaacaacacaatctctgcccctaaaaagatccaaaacccgagaatattgagtctgccggtttcagattgatattccataggcgcgttagaattgccgtgttctgcatgttccataaatcacgcctcctttattcggaaatctttctttccgtctcttttatttcttcaacaggtatatagtagccattgtcatattcaaatgaacgaagcaccatgcaaagcagaatgccgatcaagccgacaatgcccatccagaaccattcaaatacaagtccgaagcctgcaataccgaacgccactgacataataagcggtcttccggagttgtgcggcatatggattttcttgaacttgctttccggatgaatatccgttttgtcttctttcaattgcaggtacgcatcttgagatttcacttcaggaagcaccgcaaagttgtaatgcggcggaatcgcagatgaagtcgcccactcaagcgtacgtcccacgccccatgaatctccgctgatctcgcgagtagagtagcggaagctgtagtagatgttgtagcaaaggattaagaatccgacacccatcatgaaggctccgacagttgaaataaagtttaatgcagtccatccgtcattcggtccgtaagtgtaaatacggcgaggcataccttgcagccccaagaagtattgagggaagaaacatacattaaatccgatcataaagatccagaagaaccattttccgattctttcgttcagcttgtggccgaacattttcggataccagaaaataaatcctgcgaaacatgcaaataccgtacccgcgatcagcacatagtggaagtgagatacgaggaagtacgtattatggtattgataatcggctgcagccatcgcaagcataacccctgttaccccgccgacaacgaagttcgggatgaacgcaagcgcccacagcatcggtgttgtaaaactgatccggcctttatacatcgtaaagagccagttaaagattttaaccccggtcggaaccgaaatcgccatcgttgtaatcgagaagaaagagttaacggacgcactgttccccattgtgaagaagtggtgagtccatactaggaaactcaggacggaaatggcgataattgagccgaccatcgctttgtaaccgaataactgctttcttgcaaacgctgaaataatttcagagaaaataccgaatgccggtaagataacgatatatacttcagggtgtccccaaatccagaacaagttagcccaaagcatcggcataccgccggcttccagcgtgaaaaagtgagcgccgaacaaacggtcaaatgataacagcgccaatgccactgtcaaaacagggaaggcgaatacgataataaccattgtaatcagcgtcgtccatgtgaacatcggcatacgcatcagcgtcatgcctttcgtacgcattttcaggatcgtcaccataaagttgatacccgtcatcagcgtaccgataccggcaatctgaagaccgagcaggtagaagttctcaccaggcccgggactcatgtcgttgcttgccagcggcatgtaactcgtccagcctgcgttcggagaacctccgataacaaaagaaatattgaaaagcatcgcacctacgaagaacgtccagaaactcaggttgttcaagtaagggaatgctacgtcgcgcgcaccgatctgcaaaggtacgacaacgttgatcagaccgattaaaaacggcatcgccatgaagataatcatgatcgtaccgtgagtcgtaaagatctcattatagtggtttgagtctaaaaaactgttattaggaagcgctaactgggcgcgcatcatcaagccgtcgaccccgccgcggaacagcatgataacagcagagataatgtacatgattccaagtttcttatggtctacagacgtaagccattcagaccagagccacttccactttttgaagtatgtgagtacaacgatgatagcaatagtggaaagcgcaatggaaacttgtgcgcccagaattaatgggtcacctgttacaaaaaattcatcccatctcaatttcattcgggcttcctcctttcttgttcaatttcaatcttgtttatcgtcggatactttaaattcgtttttctttacattttcccacggatctgttttagagtgcggtgatacggctttgtagccaaggcgtttgcgcgcctccatcgcatattcggcatcttggccgtggtcaacgtattttaagtgtgtagaagagaacgttaatttaccgacattctccggaagcatcagttcgtcatacttctctttcgtcagctttggagaatcgctttgggcttttttcacccagctgttaaagtctttttgcgtaacagcttttacgttgaatttctggtcggcaaagtgttcgccggtgaagttcgcgttgcggccttcatatgttcccactttgtcagcctgtaagtattgatccatcagcattcccgccatcgcgtatttttgtcccccaagctgaggaatccatagcgatgccattgaatcggctgaagaaattttaaataaaaccggacggtctacaggaatgttcaggtagttaaccgtctcaatatcctgctctgggtagctgaatacccatttccagtctaccgaagtagcataaacaacaagaggctctttatcctttgtcgcttcaggcgctttttctaacgaatatatcgtctgtacggtaggcacagaaagtgcaataacaattaaaattgggatcactgtccagactacttctaagaacgtgttgccgtgcatctcgggcttgtaatttccgctgtctttgcctttgcggtcgcggtatttcactaaaatgattgtaaatagtacgaaaacgacgccgacaatgaacagcataaatccgattgacaagagaatcagatctttctgctggtctgctacaggtcctttcggatctaaaacggaaatgtcgctgcatccgcccagtacgaaaacaacagccaacatcgctaataaaagtaacggtttaaatgctctgaacaagaagatcaccatccttcctattgatgtagtgaatctgaaatgtactttctcaaaatcttttctctatctaccttgttatgctatcaaaatctgcccttattagctttatttttttctaaagttcatctttttttcgacctaatgtcacaaaatcgtcaaaaaatgcatgaactttttccacttgcgcaaatcaaacataaaaaattttagatcatttagcatatatagagaaaaaagatagtgagaacgaataataccaaataaaggtttaccataataaaaaacgctggtcaacaaaaagtttcattttgttaaacattctacaaaagaaatattttttcctttgctcacaccttttcacacggtttccattttaacgcaacgcattatgaaaaaaaagaccggaacgcgccttgatatgttcattataaaaaacgcattcatatgtttaatatggacaaaacgaaggtaacatataggcataaataataaaaaataggaagtgatatttatgggttttatcgtatctctgattgtcgctattattatcggctggatcggaagtttatttgtaaaaggcagtatgcccgggggaatcatcgggtcaatgatcgccggtctgatcggcgcatggatcgggcacggactgctcggcacatggggtcctcaccttgccggctttgccatcattccggcaatcatcggagctgcgatcgtggtattcttattcagcctgatcgccagaagcagaggataaaaaaaagcctcgtcccttatgggatggggcttttttccggtagagcgcccaaatggcggataaaccgccggaaagccgctctgccttcttctgactgtttaaagacgccggcatgctccagtatccgcgcaaaggcatggccgatttcctctttcaaaatctgttccgcgttttctttcgttaccttccgcttatgcagcacgctgagcgcccaatctttatgcgttgccgcagaagggtctgccgttaagaccgcttccgggtccggtgagcacagcgcttcagccgtgtatttcatttcttgttcaaggcggcccggcagaatcgcaagccccattacctcaatcagtccgatattttcttttttcaggtgatgaacttcctggtggggatgaaaaattcccagcggatgctcatcagaggtgcggttatttctgaggacgagatctaattcgaataaaccgtttctccgccgggcaatcggcgtaattgtattgtgcggtgttcctcctgaacaggcgaggagatcagccgcctcatcggaataaccgcgccatgcccgcaggatggcatccgccgcgccggaaagctcagacgcactctcgctttgcaggcggatgaccgacatcggccacttcacaattcccagcaccgttttcggatagtcaggcagcctgtaccggctttctgtctccgcccgcgccatcgggaattcataattgcccccctgaaaatggtcgtggcttaaaatactgccgccgacaatcggcagatcagcattggaaccgagaaaataatgaggatactggctgacgaacgacagcagccggtcaaacgtttttttgctgatcttcatcggttcgtgccggtctttcaaaacgatgcaatgctcccggtaatacacatacggagaaaattgcagaaaccactgctcatcgccgagaatgaccggaatgacacgaaggttttgacgcgccgggtgatccggtctcccctcgtacccgacattttctttacaaagaacacatctcggataatcggattgaggctgctctttggcagcggcaattgctttcggatctttttccggttttgaaaggttgatcgtgatgtccagctttccgtaagccgtctcagccgtccacccggcattccgctgtattctgtccgaacggatataatacacatcctctgaaaatcggtaaaacgcctttgtcgcctgctccggtccgtgcaccgcctttgtttcttcaaaacgacggacaatctcggacggctgcggggcaaagcagcccatgatcttcgcgctcagcaggtcgcgataggtgtctgtatcggctgaaatccggcccgtttctgccgcccattcataaatcggggccaatatgtccggcaatgatgccgccgattcattttctttctgttctggaacctccggatgggtgatatgcaaagcttcatataaacggtttcttgtatattcaatatcaagaaatgaaatcagctctttttgcaatccgtaccggattaaacgttccacgtgccgctcaattgccatcgtcatccccctttagttctctcgctccggctccgacatccgccgtgtaaaagtcagcttttctccctgtcttttcctcatagcgggcccctgccgtttcaataaaatccgaaaccgcatcgtccttgacgatattgaccgtacagccgccgaaaccggctcccgtcatccttgatccgatcaccccgccgtggcgccaggccgcttcagccagtgtatccagctcatgactcgtcacctcgtagtcatcgcgtaaagagagatgcgaatccctcattaattcaccgatatgataaagctgattgttactgaacatgtcggcggcctctattgtgcggtgattttcatagacggcgtgtttcgcccggcgtctgttcacttcattctgaatcagccccgcatgggcatcaaaagcggaaggggtcagctctcccagtgattgaacggaaagatgcttctgaagatcacaaagcgcctccccgcactctttgagcctcgtattatagcctgagtctgcaagcgttcgttttttattggtatttgcaataacgatcgacagccccgaaagcccgagttttgtatattcaaagctgagcgtcccgcaattcagcagaatcgcatgatgtttctttcccattccgatggcgaattgatccattattccgcagctgacgccgataaaggaattttccgccgtctgagcgagcttcaccaagtcgagcatatccgcctcaagctcatggcattccttgagaatgaccgccgtaacaagttcaatcgaagccgaagatgacagccccgctccgttcgggatatttccccagaacacaatatcgaagccgtgcggaagggaaaaaccgctgccgagacattccgccatgacccctttcggatagttggcccacccgtcctctttttgataacggatattatcgagactgcattcctttatgcccgcttccttaaattgatgagagtacattctgacgagcctgtcctctctctcccggacggctgcatatgtaccgatcgtcagcgcgcaaggaaagacgtggcccccgttataatccgtatgctctccgatgagattcactctgccgggcgcaaagaaaatgcgcaggtcctccgattccccgaatacatcagcaaacgctttctttattttgtgcttcatacgcatcccctttcaccattacactttcccccggggcgcggaaagaaaccgttatgacacgccctcttctttcgcttttctgaagacgatccacttgctggccgcatagttgacgactacgataatgacgttatctgcgattttcgccaacgtttcgttcatatgaaattgactgaccagaagaatcatcatggcgagatcgatggcgagggacaatacccgcacgctgaaaaaggccgtcaattctttcatcagactccgcatccccgcggtcttttgctgaaatacatacagtttattcgtgacatatgcaaatagaacggacagaatccaagcagcgacggtcgccgccttgtaatccatctcaaatgccgacgtcagaaagtaaaaactgacgatattcacgatggtcgtgaatatccccataatgatatacatcataatttctctgtagcgcatggcagttcctcgctttctgaaagacttttctaaaccttttgtcaaatcaagaagaacgttaccccgattttctgccgctgacaaaaacatagagcgcgtcaaacatgctgcggaaagtaaccggccttcccagcacattggattgcttaatcatcccgtcgatgagcgcgcacatcatgttagcggtatgctcggtatctatatggtcttctattaaatttctcgatttgagccaatttatgtacatggtgctttcttctatccataacttataaagacggatataagcttcatattcactgacgactttgtaagtaggcatatgaacggcaaaagacacaacattccaggcaggcttgctgtttacaaaccgcatcaacaggctggccgcgcttgccgcagcttcacaaagcgtcaacggccgcgctgtttgcttttctaattcgtcgagatagccagtgatgatcctttttttaatctgacgcctgtctaacaaatgcttcagaaaatcttccttgctttcaaaatgaacgtaaaacgcgcctttgctgaaacccgccgctttactgatgtcatcgattgagactgaatcgtaagctctttcaatcaggagatgaaggcctgcgtcaataaaactttcaaatgtttcttctctcttaatttgaaatttgttttttttcattttttaccccagctgtttgatcattcactttatcttacaccgaatcattcttttgcggtattttttatgcaaaaagaatatgctagtcgacgctttgagggtaaatgttaataggtcatatgatttatttttatttgcatactatccagtcagtatttatttgtttattattatacgtaagaattcttgaaggattttggttatttcagtcattttcttagggaataggtaggtgaattcatcttcaatttgggattaccggccaactatgtgtgatatttgttatacattggctgctgtagctgggcaaatcaatttttcaattggaggttcttatgaaaactcatgtaatgaaagatatagatcaagattggcaattgttaattcaagaggctagaatcatgggtttgcacattgacgatgtgaggcgcttcttaaatactgaaaaagcggtgaagaaaaaaacaccaatgaaaaacaccatccgccagcggtaagattacaggcggatccttttactctatgacctgccacagtccgcccgcacccgagttttcaaaggaacagccgcaataagaggggaatcagagaacaaaccgtataccggacaaccattcccgtcctcattccgcaattgaacagccaaacatggtgatatgagatccccccgctgcatatcttgtgtatatgcccatttatgaggtgatacacagatggatacgaatccctattatgatgaaaaacaacagaactactacgaaggcctgaatccttatttattgaacaaaatagacgaaaactggcggacagtgcttgatgtcggctgcggcacaggcaatttaggagcagcgatcgaagaccgcggaataacggtttacggcattgaggcgtatcccgaagccgcaaaaaaggcggaaagcaaattgagccacgtgctttgcggcgacattgaatccgccattcttccgtacgaatcagaacaattcgactgcatgctgttcggagacgttcttgagcaccttatcgacccgtggtccgtgctgaaaaagcttcgtccttatgtaaaaaaagacggcacggtgcttgcgtgcataccgaatgtcggccacatctcagtggtgctggagcttttagccggcaaatggacttacagtgacgccggattaatggatcagacccacctgcgtttttttacccgtgaagagacgctttcattatttaaagccgccggctatgaggtgaaacgcattgaggcgatccgcgttgatcacccctcttatcacaaagccatcgcagcattgcacgaagtatgcgtacagcttggcataaggcatgactttatgacagaagcatcggcgtatcaatatgtgattgaggccgagaggagcatgtaatggattcacattcatttctgtttgtcgtctgtgtgaatgacgagccgctctactcccggtgcaagagccatatcatgcagcttaccgtccccccttcatactccgttgatatcatgccgatatacgattcagcaagcatggcctcgtcctacaacaaagcgctgagacacccctccaaatataaaatttatctgcatcaggatacctttatcattcatcagcatttcctgcatgacatgcttcatatctttcaatctcatcaggagctcggccttctcggtgtcgccggctgcaaaaccctgccgccgaacggtatttggtgggaaagcggacagcggatgggaaaagtgattgaataccgggggaatgcttatcacccgctggactttgagcacggcgatgaagacggcctgtttacgcccgctgacgccattgacggcttgttaatggcggctcaatatgacgtggagtggcgggaggatttgtttcgcggctttcatttttacgacacatcacagtcgcttgaatttcaaaaacacggctatcaagtcggcgtcgcctgccaaaaagacccttggtgccttcatttttgcggcgactcatttgacgccgcggcatatgaagcggacagacaaacatttgtcaaacactatatggcaaagccctctcgctgatcgagagggcttttttcgggttaacgtttattcagttcccgctcaatgatttgttcaaaggtttcctttcccgccgcgccagggattctctcatcgccgatgataaacgtcggcactgccgtaatgccggcttcttcataagcatggcggagcgcttcctgctgtacgtgtctgtacgctcttgtctcaagcgcctctttgaaggcagcgccgtcaagtcctgcttcttccgcaagctttgtcagcacgccaacgtcaccgatattttgttcttcttgaaagaacgcctgaaaaacgcgtgtatggtattcgcttcctttcccatgttcctttgcgaaatgaaagccttcaaatgccaaatccgtgtaaggatgcggtgacacgcgggggaacgtgatttcaacgcctaacgactgcgccatcggctcaatggagtttttccacatctgccgcttggcgggatcattcaccggatcaagtttcggcgaggggctcggacgcaattcaaacggcatccattccacctgtacgtccttgtccttgattgcttcttcaaacgccgctttgccgacaaagcaaaacggacatacataatcagaatatactttaatctgcagtgtcattgtaagtctcctttccttttcattttaagttgtaacatatatagttacaagtgttttttttaaaacaccctccatatggaaggtgtcacgattccagcagcctttgggcgatatattctccttttttacagccgccgggacaggcgaataaggaagagccgatcgtttgtatgtattcattcagcgcatcctttgccgccaaagccttcagcatcgggacaaattggcggtccgggtctttttgaaagcagataaacagcaggcctgcgtcaacatagcccgtcttcggatcaattccgtccgtataggaaaatgcccggcgcaaaatctgtctgccggttgattttgccacgctgacatgcgagtcggcgggaatttgattcagcttcacgggatcggtttcctttttttgtccgaaaggcgcacccgagcttttcacccgaccgaacgtgtcctcttgttccttcaaggatgaacggtcccatatatctaaaaacatcttaattttcctaaacgccatgtacgtgccgcccgtcatccagtccggttctcctgattgaacccaaatgatcgaattcatcaggttttcatccttcgtgctttggttgccggtgccgtctttaaatccgaagaggttgcgcggtgtttctccgtttttcccgccgcttaagaaacctttattgagaaaacggacttcgcacacccccgatgcctgtttcatcaggttgcgcaccgcgtgaaacgccgtttgttcattatccgcgcagacttgtatgacgatatcaccgccgccttgtttcttatcgagcttgtcgttaggcatcggcggaatatcggcgaggtgcttcggttttttatctttcagtccgaagcggtctttcccgtctttctcgaaaaacccggggccgaagccgaaggtaacggtcaaattcgccggtgccagatcctgcgactccccggtatcctgcggaggcatatatttatttttctgttcgcccgacgggacggcgcctgaagtcagcagctgcgtcaggcttgtccattgtttgaaaagggagatgacatcggctttgtcgcttgacatgacatcaagcgccgcaaaatacacatacgtctgatgcgccgttgtgattcctgcttggtgcttcccgtaaaaaggaacgatttgatcacgatcccttttttcatcattcttctttgaagcggtggccgccggtttgaagagcggcgcgagtcctccgaggccgctcgctccgacagcaacggcggcgcccgcgacggcgccccacttcaggacatcccgtctgtggatctgtttttccttgttatgttcatcgctcatgctgcgtcttaactccttttaaagcacatcggcaatcttcgacatggtttcagaaagagccgtcagcttcgtgcttatctctctgatttgatctgtacttaatgtatcacaagacatataagattgatcgcacgttttgtatttcgacatcaaaccttcaaattcgctgaattccgcatcaagtttttccatgacgtcgaaatgatctctcactgcgcgcttttcactgtttcatagagggcttttaagccttcggcgccggcggtgattggttcaggcgtcactttgagagaagcgatagagccgtcaaacgttccggtcgatattgcaagctgattgccctgttcttgacatacggcttatattctccaagtccgtcactgcctttttgcgcacacagaaaaagggccgccctatcgggacagccctgctttggagcgccgaatttcctctgaaaacttgcgcgccgccgcttttggatcttcggcttggctgatggcgctgatcatgctgacgccgtctgcacccgcttcaatgacgggcgccgcgttgtcagccgtaatgccgccgattcctaccatcggaatgctgatgccctgacgccgcacctcttcaatcaatgtaacgccctgcacagcttcagcatctttttttgtttcggtcggatagaccgggcccattccgacgtaatcggctccggcttcttccgcccgcttcacctcggagacgttatgtgctgacacaccgagtatcatatcgccgattgccgctctcgtttcttcggcgtctgcgtcatcctgcccgatatgcactccgtccgccttaaggcgcaaggccaattcgacatcatcattaatgatgaaaggaatcccggcctgcctgcagacatcctgtacctgcttcgcgaacaggacacgtccctcccctgttaaagaaccgctccccttttcccgaaattgaaaaagcgtagcgccgccctcaatggcttttttcaccacggaaacggggtctgcgcttgtattgtttgatcccataataaaataaaccgataacatatccttcatcatttcccgagaaatacgcgtcatttttctgtcaccctttcaattgcggcaagctcggccgcttcttgttctgagatgcttgccagcttgtttaaaagctcaatctggaagctgcccggccccttatgggaggtgtccagagcggcaagctgagcggcgcttccgtatacagaaacggctgaaacggccgcttgcagaacgtcctgtcccgccgcgcagaaggctccgatgacagacgtcagcaggcatcccgcccccgtcaccttcgtcagcagtttatcaccgttatgtacggcatatgtgtcggtgccgtcggagatgacgtcggtttttccggtaatcgcaatgaccgtcttcagcccgcttgctgccgtcttagcgagctgaaccacatctcctccggcttcccccgcatccacgccttttatcttccaatcaggggcgccggcaatattggcgatttccgcggcatttccgcgaatgacggacaagcggacctcctgtatgatcttgcgggctgatgccgtccgaaacggcgtggcgccggcgcctaccggatcaaaaatgaccggaacaccgttttcattggccgattttccggctgcgatcatagcttcaaccgacgccgaactgagggttcctatattcaggacgagcgctcctgcgattttcgccatgtcggctgcctcctcaattgcataagccataacgggcgatgcgccgagcgcgagcagtccgttagcggtgaagttcgtaacgacattattggtaatactgtgaacgagcgggttttgatcccgcactttactcaagtgttgagctgcggtttgtgcgtccatgcttaatcatccttttttctctttttcggattccataaatacgatttcgtatgctccagccaggctctggcggcaaaggacatatagcggtctttccgccaaatgatggctaaatgccacggaatgaccggatgaacgagcggaatggttctgactttgtcaggatcaagaccgcggcagattctttccggcaagaggccgataccgagattggcggataccatttcgctgataaagtcccactgtgacgtttcataaatgacgtgaggcctgaatccggctttcacgcattccgtcataattcgattatgaaggacaaaatcctccctgaaaaatatgaacggctcttctttcaattcgtgaagactgcattctttctcgtcagcgagccgatgtgacggatggacgacgagcataagggtttccttgacgattgtgaacgtatgaaaaatttcttcattcgcgggaagcacgacgaccccgatatcaagcgagccgtcctccaccccttgctgcactttaatagagccgtcctcaacaagctgaaacgtcacatcgggatatgtgacgcgaaagtcaccgagcactctcgggaaaaagccggacccgatcatcggcggaagaccgatgcggacgtgccctttcttcacttccataatatcgttcagctctgacgtcaggttttggaatgactttgtaatttcctgcgcctgcacatacatgctctgcccggcgtcagtcagttcaacttgccggccattgcggtaaaacagcttaatgccgagctccgtctccaggtttttaatcatttttgagattgtcggctgtgaaacatacagcgactgtgaagccttcgtaaagcttttcaaacgggccacttccaaaaaatacgttaagtgccggatatccattacatttcatcctttctatagacaaaaggaatacacattattctttatatgtattttacctatagcaaaaccttctgtacaatataaatataagggaggcatcattatgaaaaaattgctgcttaccgttattcaaatcgctctgctgtttatatttgcgcgtctgatcaattgggtcacggcggctcttcatataaatattcccggcagtataatcgggattgtgattcttttcacattattgcatttcaagattatcaaacttgaatggattgagcttggcgcagcatggctcctcggtgagctgctgctgtttttcatcccgtctgccgtcggagtgattgaatacggagatattatgtctaaattcggcgtaagcattttacttgtcgtcgtcatcagcacatttgtcgtgatggtttcaacaggtacgcttacacagctgatagcaaaaagaaaggagaaaaaacaaacgtgttcatcggaatcataagtttattcttaactgtcttagtatatttgggcgcgaaaaaactctacattcgttttccgcgggtgtatacgtcgccgcttctgattacgcccgctgttttggtcgtactgctgcttcttgtcaatgtcccgtatcagacatacaatctcggcggcggactgctgaccgatatgcttcagccggcaacagtggcgttcgccatcccgctttataaatatttcccgattttaaagaaatacgccgtggaaattattttgaacgtagcggtcggttcatgtatcgccattctgtcaacggcctttatcgcgaaatggttccatctcggcagcagtttagtcgacagtctcgtgccgcgatccgtgacgacgccgattgccatgaacgtttcagaaatgatcggcgggatgccggccgttacagcggttttcgtcattttaacggctttattgggaacgatcatcgggccgatggtcatccgctatttccgcattgataacgaaattgcccggggcgtgctgctcggaactagcgcgcacggagcgggaacatctaaagcatttgagctcagctccgtatcaggaacgatctcaagcgtgtccatgattctcgccgcaattatgacgctgtgcgcggccccgattttgctttcgtttatgtcataaaaggctgctccttacagagcggtctttttttatttgccacgcagattgatttgtctgtccttcataaaaagacgaaaacacgatatgataagatatgaagtgaaaagactgaagaacggatgtgtcatatgaacggccagcagcgaagcagcatcagaaaaggacttgaagtcgatatcgtcctgaaagccgatcagcgttcaggaaagctgacaagaggaatcgtgaaggatattttgacgaactcaagcttccacccgcgcggcattaaggtccgccttgaagacgggcgaatcggccgggtgcagaacattattgaatagaaaagagccggagcttcacgcccggctttttttctttaatttcagcaatgaaatcctcatatgttctccctttatatacaaaaaatctttaaccaactattgactcttacgttgcgtaatactttagagtagccattaaggaggcggcaaacgtgatgggtatgaaagtaaaagaagtagctgaactgattggagtaagcatacgtactctccatcattacgatcaaattggattattgactcctcaggaaacgaccgattccggttatcggctttattctgaagagaatcttgaacagctgcagcagatactatttttcaaggagctcgatttccccttaaaagagattaaagaaatcattaatagtccttcatttaaccgaagggaggcattaattttacaaaagaaaatgttgattgagaaacggaatagagtcgataaaatgattgaaaccatcgataaatcaatcaaacatatgatgggagagatttgcatgacgaacaaagagcggtttgagggaatgaacttcaatcataatctttatgaacaagaagctcgcaaacggtggggtgatcaacctgtcgataaggtaaatattagattgaaaaacatgactgatggtgagcaaaaagatttatctgataagtggactgcaatgttcaataaatttgcactccttattaaccaatctcccaagtccccagacgtacaaacagctatcaaagagtggtttgattttctcaatgaaaattttggtgaatattcttttgatgccttttacggattaggtcaactctatattgaagataaacgcttcactaagaacatcgaccagtatggtgaagggttggcgaagctcatgagtgacgccattacaatttatatagatcatcaaaaaaagggtggtacccattaaaatcattatcgaggatacaatcaggcaatacgaaacgttattttcaatgattgaaaatagagaagattattatcggtattcaatgatgaaaccttttgaagatatgtggaaaaagatgaatgttcccttaaaggcaaagcagcctaacggatatgatgtaatcatggctgcaaatatgctgggctatctgagcatatttgatacggaaaccggaagaaaagcattggagaaactaaaagaaattcaagctcttcaaattgcatatggcactttaactcattgtgtagaatttatccagcaaaaccgcttaaaaataaatgctgatgaaataaggtttgggatgtatctggccaatcaaaaaaagcttgagttacatagagggtattgtggattcggaggaattccgggatttattcaagtttcaatattccccaattcatataacataccgagactgcctgctgtaatcgcacacgaatttcatcataatattcgtttttcgtatttcaattgggattatgggaacgtaacggttggtgattacttaattatagaggggttggcagaatcgtttgccaaagaactttacggagaagctctgttaggtccctgggttacttcttttgaaaaagaagacttagaatactcaaaagaaatcatcaaagactcattaaatgtgaaaggatttgctgaggtcagcagttacatgtttggcgacacctttgcagccgaacaaggttatcagcctgtcggcttatcaccgtttgcaggttatgcggttggctaccaagcggtgcaatccttcatgaaagccaacaatgtggggattagtgaggccactttacttagcacagatgagatactaagtaatagcgggttgtttctttaagatgtgaagattattttatcccgtattaacgcgatgaaagagggttttcttttcccctctttcatcgctataaatggtcattctattttttccgcaagaaaacaaccttcaaatagttcccttctttaaacgcgggaatcgttttgaaatcttccggaagcgtgtattcttccaaaatgtcgtaacgctcatttgtttctttaaaggcggtctctataaagcctttaaatttcttcatattgaaggcgctgctgtttgtcgaagcgacgatgatgccgttttttgcggtgatggcgatcgtttccttcagcagatttttataatctttcgccgcgctgaacgtccgtttttttgtgcgggcgaaagaaggcggatcaaggatgatgaggtcaaactccagcccttttttctccgcatagccgaagtatttgaaaacatccatgactttaatgtcatgcgcctcataatcaattccgttggcgctgaactgttcaatcgtttttgcgagactgcggttggcgacatcgacgctggtcgttttctcagctcctccaagcgccgccgcaacggaaaatgcccccgtataagagaacgtattcagcacccgtctgccgtttgcatacttgtcccgaatcgctttccgcacatgacgctggtctaagaaaatgcccgtcatcgccccgtcgtttaaatccactgcgtaccgtatgccgttttcttgaacaatgaccggaaaatctcctctttcgcctttgacaaaatcgtcgtcttccacgtattgcccggccgtatcgaatcgtttcttttcgtagatcgctttataagaaagctccagtccgtcaatcgcctcaatcatgctgtccttataagcgtaaatgcctttactgtaccattgaatcagcagataaccgtcataaaagtcaatcgtgacgccgccgatgccgtcgccctcaccgttgaacagccggaacgccgtcgtgtcgggtgccttaaacagatgggctctcgcttcagccgcttttttcagcttgtccataaagaaacgtccgtcgatccgttcatctctcgcgcgggacagcacccagccgactcctttattctgcaaaccgtaatagccttttccgataaactcacccttctcggatgtcacatcaaaaagatcgccctctgttaaatgagccgagcttccggacagagcgtctttttcaatcagggggaatccttttttcagctttccggcaaatgtatctttcactgtaagtagcttcattgtgcattcctctttcgttttgctttctcttatcgtaccataaaacatgatcaacaccgcattgtcccgaaaaattcaaaacagggggaaaaccatgacagccaaaagaatcgaccatacaggcattatggtcaaagatattgaaacatccatcgccttttatcaagacgttctcggtatgacgttaaaggatcgtatcactcatacgaacggcattattgaacttgcctttctcggctttcaggaagggccggagacagaaattgagctgatccagggctacagcagcgagcttcccgcagaaggaaaagtccatcatgtcgctttattaactgaagatatcgcggcggagttcacgcatgcgaagcgtcagggcgccgtatttatcgatgaagaaatcacgacgcttccgaacgggtaccgctacttttacattgaaggacctgacggcgaatggatcgaatttttccagcgttaaaaaaacgggcgaaagcgcccgttttttttatgtttcttcagtgacgttttgttccgccgcccgttcctctctccatttttgaagatcccaaattcggaaaaacggataatagatgataaatgtaatcaggagattgatcagctgcatgaccgaaccggagattttcccgcccgtcgccaaataaccggaaatcagcggcggcatcgtccacggcacggcgattcccgccggttttgccaccatccccgtgctcatcccgatgtacgtcgccgtaatggtcaagagcggcgcaatgataaaaggcacgattaacagcggattcatgacgagcggcatcccgaaaataatcggttcgttaatgttaaaaatcgcgggcccgatgccgagacggccgagctgtttcatctgtttgcttctggagcgcacaagcatggtcagcacaagggcaagcgtcgccccgcttccgccgacattaatccatatttgaaagaactgtgtcgtaaaaatgctcggcagcgcttctcccgcctgaaaagccaaacggttggcatccatcgccccgtaccagatcggcgacatgacgccgccgataatggacgcgccgtgtatgccgcacgaccaaagcagcatttgcacgaattcagcgataagacttccgccgagactcccgcccaaaatagacagcggggtgcccagcagatcgcctacgacattgtggaggcttttaaaaggagttatttcaataaacagacgggccagccatacaagcgtaataataatgaaaccggggatgagcgcaacgaacgatttgctgaccgcaggcggcactccgtcaggcattttaatgacgatatttctttgtatgataaaccggtacacttccgtagacagcattgcaatgatcatcgcgacaaacagacctttgcttccgagcagcgaaatcggaatgccgcctcccaccataatctctgttgccgagccgtcaggaataaacggaatctgatacggcgtcgccaataaaaaggcggcaagggcaatggctcccgacgacagggcatccacctcatagctttccgcaagccggtaagcaatcccaaaggcggcgacaagcgccataatatcaaaggacgcattcacgggatacccgagcttttcaacccaattttcaccgaaaagaccagccataaaatcggcataaccgggaatcggaagactcgtcagaatcagaaaaaccgatccgatgatgataagcggcatcgtcaaaataatgccgtcccgcaaagctcttaagtgcctttggccggcgacttttccggcgacaggcatgattttttcttccatgacccgattgaacgtactcatttatcaaaaaccccctttttgagttcattgcgcagatgtcttaaagcattttctccatcatattttggaaacgcttacatttgcatacagaaattttccttatccctcaggaaaaaaagaattccgcactgccgatatataaagaaaaagggggaattgcaatgtatcacaccctgaaaccgataatggccgcggccttgtgtgtcggcctgttctccgccgcggcgcccgcgcacgccgagacgcacgaccgggatgttatcgtggtgtacaaaaatcaaaacggcaaggaatccgccatagacagcggagcggatgtggaacagacctatcagcatctcccggcagtcgccgtgtcagccgattcacaaacggtgaaagacctgaaacaggaccctgacatcttatatgtagaagacaatgtatcctttcaggcagcaggcggttctgatatccgcccgttatcagcggcccaaagcagcagttacgcgctgccgcaatgggatatcgaaccgactcaggtcaagcaggcgtggaaagaaggcttgacgggaaaaaaggtgaaagtggctgtcattgacagcggcatttatcctcatgatgatctgtccattgcgggaggctattccgcagtcagctatacttcctcatacaaagatgacaacggacacgggacgcatgtcgccggaatcattgcggccaaacatgacggatacggcattgacggtattgcgccggatgtccggttatatgcggttaaagcattagacagaaagggtgcaggggatcttaaaagccttcttaaagcgatcgactggtcgatcgccaataaaatggacatcatcaatatgagcctcggaactaacgcagacagcaaaattcttcacgacgccgtagacaaagcatacaaaaaaggaatcgtaattgtagccgccgcaggaaacgacggcaacaaaaaacccgtcaattatccgggcgcctacagcagcgtaacgccagtctcagcgtcaactgaaaaaaacgggctcgcggctttttccacgaccggaaaacaaattgaatttgccgcacccggcaccaatattacgagcacgtatctgaatcaaatgtacgccacggctgacggcacatctcaagccgcgccccacgtcaccggcatgttcgcgctgctcaggcagaaatatcccgaggaaacaaatacacagctccggcagcagatgcagcaaaacgtcaaagatctgggcgctcccggacgtgacagccgattcgggtacggcctggtgcaatatcatgtaaagcaaaagagctatgccgaacgggccgtaataaaagcggaaaagacgaaaaagcaggcagatatcaatcaagcaaaaacggccgtcagcaagctgtccaagtcaaagggaaaaaccgctctcgagtcccggatcaataaagttcagacggcaagaaatgtgacggacgcaagagacaaagtccggactgccgaaaaacaaaagaaaaaaaccgccgtcaatgccgcacaaagcgccattcgcaaattaccggccggttcagagaaaaaagggctgcaaaagcggctgaacgctgtcaactcaagccttttgaaaacagctgaggccagcgtcaagcaggcggaaaaaaagacctctgaggccagcaccgcaaaagcccaaaaagcagtcagcgaaatccagccgggaaaagaaaaaaacgctctggaaaaacggcttgaccggataaaagataaactcaaccggcagcaggctagagacaaagtaaaaacggctgaaaaaaccaagacgaaaaaagcaaaatcagcggcgcaaacggcagtcagccgattgaagccgtctgccgaaaagaccagcctgcaaaaacgcgtgcgtgcgattcgggtgaaatagcaaaaaacgcttatgagccggataacggcttcacaagcgtttcatcacacctgcctattggttcatggccgggcggtcgatcgtgttccatttcgtaaaggacatatatcggaaataatgatcacgatacgggtgcgaggtgcctgtattccaaggcttgtcgctgccgcagaaatggacgatggccggttcggcacgtgtttctctgtaacgtatacggtcgatcagttcaggaggcgttttctcattcatgataatatgcgtctgcgcgttccagcgcggatgcagttcatgccattgatcatataagatcgcgttaagcgcgtcctgatcatgaaacacgagaaaatcctccgagctgttttcgttaataaaatcaatcaccttttcggaaatattttgttttctccaaggttcgaaatctataatcataatgccggaattaaaatacttggcagtttcgctgatattcatttttttcagtctttcatgctgtccggcgtcttctaccgccgcaactattgccggggaaatatccaagtcccataaaaccgaaatatcttccatcacaattgcatcgcaatcaatgtaaatcatccgctttacggactcatccttaattaaatcagggatggaaatgcggtaataagccgcttttgtaatgtggctgctttcgactgcatgcttgtattgatcagcgtctacttctaaaaattcaagcggcgtcccgaatgacatcgcggtctgttcaagcttgtccttgttttcggcagtaattccgccgtcaatcacatataatttcgcatcccttgttttatccatattcatcaataaagaagcgaacatcccacccaaatgacgagcataatgatcatcggcacatgatacgatatgcattgtttcattctttcccactgatattcatctccctttttgttgtacaaatgtctttcccttttttaaaaaagtaaacctcgatcttacacattttttctgcgggaatgtgctgtttgcaatttgatatcttttgcattccctgttcaaattcaatcaggatttcagcctgaatcatcgtcagaatatatcgcgcaggaaagcgaaaacacgtaaacataaaaacaaccagccggactgcacataaaagcggtccggctggttgtgatgcgtcgatcgtttaatcgacttctttcttaatcccaagcatcttttcgtctaaataatgggcaatgtccgccgcttccttcagctcgtcggtcagatgctttgggacttcgttatttaatttgtaataaattttatgttcaagactcgcccaaaaatccatggcgatggtgcggatttgaatttccgccttcacatattccacacgattcgtcaaataaacgggaatttcaatgatcaaatgcagactgcggtagccgttcggcttcggttgtttgatataatccttcacctttacgatcttcaggtccttatgctgcttcaaaacctcagcgacattataaatatcggaaataaaggaacagataatcctgacacccgcaatatcatgaatatgctctttcatttcctgcgtcgtcacatcgcagcctttgcgcatcagtttattgacgatactctcaaaacttttcacgcgtgattttgtatgctcgatcggttatgcccgtgaatcagattatattcctggctgatgatagaaaacttcgtatccagctcatctaaagcgaatttataaactaataattcatttttccaatcttccatgaccgttttcaaatcatccatatgggctgttgacaagtccatttttttcatctccttgctttgctgtccgtatatgagacgtgtcagtccgcggtcaggttctttacaatatcgtgaagattatgtcataaaaaaaaagcaaatgccggttatggcatttgccctttcatttgatcagcggaaataactgatcaggagtccgatggaaagcaggaatccgaagaatgtattggtttgcgccgttgatttcatcgcaataatcatgttcatcggcatttcgtttttcacaaagcctttcacggcctgaacgggtttcggcacgctcaggaagaccaggaacagccacgggcttgtgtaacccatgatgacaagaccgatgatccagatgtaagcgatggcaaaagatgcggccagtatcatgacggcccctctatgccccatcaaaatggccagggttttacgtccgccctttttatcttcctcaatatcacggatattgttggacagattaatggctccgaccaagatggcgatcgggatggaaatcaaaatgctctgttcattaattctgcctgtctgaatgaagaaagaaataaggacaaatacagagcccatgcaaatgccggagaacagttccccgaacggtgtatacgcaatcggcagcgggccgcccgtatacagatagccgatcagcatgccggcaaggccgatagccgcaagccaccagctgctgctcatgcagatataaacaccgagcacgagggcaatcgcataagagccgagcgccagctgcagaattgtttccggcttcatgccgtggcggacgatcgctccgccgataccgacggaatcctccgtatctaaaccgcgtttaaaatcgtaatattcattgaataagttcgtggcgatctggatccaaaggcaggaaaacagcatggccaaaaacagcaggaaatcaacctttacgtaaaacatcgccaatacggtgccgagaagtacgggcacaaacgatgccgtcaatgtatgagggcgggttagctgccacaaaatgcggcccatgctttctttctcgggcgtcttttggctgccccccatattgttttgattcattttcctcttcctttctattaaaaggctttcacagtcagccgataacagtagtgttgaattggggttttcacgttttctgctaccttatctatcataataatttcttcctcatttcacaagatgcggcgctttatcggctatcctgccggaaacggcttttcgcccttctccattggggttcggcacaagcctgcttaagaaaaagccgccaaaatttttttacctcgtttatatttacgataagttaaaaatcccgcctgaacagcacctttttagtatgatcatttgctaatttatacatgcgtgttttccatccttttgtttctcattcatttttaaggaaattttaagcttaggatattagacatattttgaaactttttgttaatctaatcgtcatatactggtgtaattattgaatacgcggggaaggaattttgaatatgatgcaaaaattaaaacgtgcttatgaaaatacattgatcaaatggacgtttcatacgggcttttattttctgatattagtattgctcttttggatgtatggatttcatacagcgaataccggcacttatatttacaacgatttctaatcggggaggataactatgaaactacttgatgctataaaaacatacgcagacgccaagccgcaggccgaagcgtttcgttccttagatcattccctcacttacggggaattatgggatttgtcggagcgggttgcgtccggcattcaaaaacatacagctgacggttcgaaagcgcctgtcctggtttacggacatatggagccgaatatgatcgtttctttcttaggaagcgtcaaagcgggccgcccttacatccctgtcgatgtttccattccggcggagcggatcgtcaaaatcattgaaagctcaggcgcagagctgcttatcagcgtatcgggcgatgcagtcgatacgggaagcaatctgattaaaaccgttacgcccgaagagcttgcagctgacggagatgcagacctcagccgtgagaattgggtaaaagagctggacacgttttacattatttacacgtccggcagcacgggaaatccgaagggcgtgcagatatcggctgataacctgcaaagcttcactgactggatctgcagggattttcctgtgggcgggggtaagacattcttaaaccaagctccgttttcttttgatttatctgtcatggacattttcccgtcgcttcaaacgggaggtacgctgcattgcgtaacgaaagacaaaatcaataaaccgaaagtactatttgaagagctggagaaatccaaactgaacgtctggacatcgacgccgtctttcgtccaaatgtgtctgatggaccccggctttacgcaggagctcctgcctgaggcagaagtatttatgttttgcggagaagcgcttccggctgccgtggcacaggagctgttaaaccgttttccgaaggcccgcgtattcaatacatacggcccgactgaaacaacggttgccgtcacctccgttgaaattacgcagcagattatcgatgaacatgaatctctgcccgtcggttttgcaaaacccgatatgaatatcttcatcatggatgaaaacgggaataagcttccggacggagaaaaaggggaaatcatcatcgccggcccgagcgtgagcaaaggctatctcggtgaaccgtctctgacggaaaaagcgtttttctcaattgacggccagtgggcatatcacacgggtgatgccggttatgttcaggatggtcagattttctgccaaggacgccttgatttccagattaagcttcacggctaccgcatggagctggaggaaatcgaagtacatgtaaggcagtctcaatatgtgcgcacggcggttgtcatcccgtatcagcctaacggacctgtcgaatatttaattgccgccatcgtgcctgaaaaacatgattttgaaaaagaattccagctgacaagcgccattaagaaagaactggccgcttcgcttccggcctacatgattccgagaaaattcatttatcaggatcacattcaaatgactgcgaacggaaaaatcgaccgtaaacgcattggcgaagaggttcttgtatgacgccttacagctcgtttttcttctttatcttacttggaatccttcttttgccgacgattattttagggctgaacggcaagagattccaaggatacaacatgtttatatccatcatcgtattggctttgattttcgcgcatgatctgcacggcgtgatcgcactatgtatctttacgctgtggcaggtgcttttaatcaggggttatctcgcttacagactgaaagccaacagcggctttgtcttcagtatggccgtgatcgcgtccattttacccctgtttttatctaaattatggccgtttttctttccgccggagcctcatcacccggttcataacctgatcagtttcttaggaatttcttatttgacatttaaaggcgtccagctgatcatggaaacgagagacggactgattaaagaaaaaatgccgcttcaccgccttttgtactttattatgtttttcccgaccatttcttccggtccgatcgacagataccgcagatttgccaaggacgaacagaaagtatggacaaagggagaatacgctgatttactgtataccggcattcataaaatttttatcggtttcttgtacaaattcattatcggatatgcgattaacacgtatttcattatgaatctgtctcatatcacccacagcaaactgtggggtaatgtgctgtacatgtacggatacagcttgtacctgttttttgattttgcgggttacacgatgtttgccgtcggtgtaagctatatcatgggtatcaaatctccggaaaactttaataagccgtttatcagcaaaaacattaaagacttctggaaccgctggcacatgtccttatccttctggttcagagactacgtatttatgcgctttgtattctggatgacaaagaaaaaatggataaagaaccggatggccgtctcgaacatcgggtatttcctgctgttcatgctgatgggcgtctggcacggactcgctctgcaatatattgtatacggcctgtaccacgccgtattaatgaccgggtataacttttttgagaaatggaataagaaatacaagtggctgcccgccaatcgttttacggcctttttagccatcgtcatcacattccatttcgtatgtttcggattttatattttctcaggaaaaccatttcatcactaaaggagattgaaaacacatggaatttaaacaggaagtattagacgtattagctgaagtttgtcaggaggacgctgtgaaagaaaatcctgatattgaaatctttgaagaaggactgcttgattctttcggaactgtagaactgctggtcgccatcgaaaaccgcttcggcattacagtgccgatcactgaatttgaccgtgacgagtggaatacgccaaacaacattgtaaacaaactgactgagttgaagtaaatgaaaaagcgtttctttggaccaattattttagcgttcgtcctgtttgtcggagctatcgcagttccggcttcatggcttacgcgcttcattcctgaaaaacgtgtcgaagagtcggcggcagccttaaatccaaatatgttccaggggctctatcttcaaaacaaaatgttcgaagactcgaagtatctgccgattttcggttcttccgagctttcaagactggatgagtttcacccgtccaactatttccaagtgaacaaccaaggctttacgccttatcttgtcggaaaaggcggggaccaatccttgatacacgccgtgaactttgcggcgcattatcagcagctgaaaggcaaaaaactggtattcattgtttctccgcaatggtttatcaaaaaaggttctgatgaacagcactttgcgccgaatttttcatcacttcaggcattggatttagcatttaataaccagattgatcccgcggtcaaaaagaacatgatgaagcgcatgctccgttttaaagtcgttcagcatgatgccgtcctttctgaattgtacaagggaatggtcaacggacaatcatggaaagtgaaagcggtcatgccggccgccaaagcttattattctctgcttgagaaaaaagatctttattattcaatgggagaaaacaagggccctgaacggacgatctctgaaaacctgaaagggaaatcgtggtcagagttaaaaacagccgccgctcaattaggagaacggagctccaagtccaatcctttctatatcgatgacgcttcttataaaaagattaagaagaaagtaaagagagtgaaaggaatcaacaaaggaagaacatacgccaaatcagtcgaataccacgactttgaggatatgctggacattctgaaagatgccggcgctgaaccgatgttcgtggttattccggtcaacggaaaatggtatgactacaccggcttcccgaaaaaaggccggactgattactacaaaaaagtcactaagcaaattaaagcgaagggctttcaggttgccgacttatccgggcacgaatatgatccgtactttatgaaagacaccatccatatcgcctggaagggctgggtgtacgtcgataaagcaatggagcagttttacaaaaacggcaaggtgacggttcactgagcacggtgatgacagaatacgtaaaaacgaacacgcaggggggcattctctcccctgctttttatgtgatttgattttttcacaaatttgaggaaaactattgcgaatatttgttgaaggtatacaatagaatataaattattttcaaataagtttgacaataacaccaatagggagacagaacattatgaaacaagatattcgtgttgaattgacttcagccaaaaaaccgaaaccggacccccatgaccttgcgttcggcagaattttcaccgaccatatgtttgttatggattacgatgccgatcaaggctggtatgatccgagaattatcccttatcagtccatctcaatggatcctgcggccatggtttatcattacggccaaaccgtttttgaagggcttaaagcgtatgtaacgaaggatcaggaagtgcttctgttcagaccggagaaaaatatggagcgcctgaaccaatcaaatgaccgcctttgcatcccgctcattgatgaagagcttgttcttgaaggcctgaaacagctcgtagccatcgacaaagactggattccgaaagcggaaggcacttccctttatatccgtccgtttatcattgcgactgagcctttcctcggtgtagcggcatcccatacgtacaagctgtttatcatcctttccccggtcggctcttattacaaagaaggcattaaaccggtaaaaatcgccgtggaaaacgaattcgtgcgcgccgtcaaaggcggcaccggaaacgcgaaaaccgccggcaactacgcatcaagcctgaaagcgcagcaggttgcggaagagaagggattttcccaggttttatggcttgacggcattgagaaaaaatacatcgaagaagtcggcagcatgaacatcttcttcaaaatcagcggcgaaatcgtgacgccggaactgaacggaagcattcttgaaggaattacgagaaattccgtcatcacccttctcaaacattggggactgactgtgtctgagcggaagatttcgatcgatgaaatcatccaggcgcatcgtgacggccgattggaagaaacattcggaaccggtacggcggcggtcatttctccggtcggcgaattgatctggaatgatgaaagtcttgtcatcggcagcggtgaaaccggagagatctcgaagaaattgtatgataccattacaggcattcaaaaaggcgcggaagccgacgtgttcggctggacgacggaagtcgcctcactaagcgaatcaaaataagcaaaaaacccggaatcgaatccgggtttttttactgctcttatgcttcaatcgacttaaagaaatgaggcagatgttctttgtgggcctcaagcatttcatccagaatggcctttgccacggagtctgacgggacgagagggttgatcgtcatcgcaagtagcgccgtttgataatctcccgtgacggctgcttcagcggcgacacgctcaaatgatttgatttgctggacgagtccgcggacagacaccggcagatcaccgacggcgatcggtttcggaccgtctttcgtcataacacagttcacttcgaccgctgagtcattcggaatgctggcgatcgcgccgttgttgatcgtattgacgggctggatatcatgtttgtcgttatagatggagctgatcaggttgcaggccgcgtcactgtagtacgctccgccccgtttttcaagctgcggcggtttgatggcgagattcggatctttgtacagttcgaacagttctttctcaaccttctgcacgacctcggcgcgtgtgccctccgtctgtgacgcttctatttcatgctcgagcatttctttcgttttgaaataatagcggtggtagccgcaaggaatcagatcgagcgccttcaggaattcaggctcccattccgcccctgaaatatttttcatcgtcatggcgtttttcgggtctcccatggcttcaatgacttgatctttcacgctgacgccgtctaagaaaacatctaatccgaagaccatgtgattcagcccggcaaattgcacttcgatccggctgacatccacgtccaatgcttttgcgacgcccattttaatgccgatcggcacattgcagaggccgacgacttttgtgagattcgagtagcggagcaaggcctcggtaaccatgccggcagggtttgtgaaattcacgagccatgcattcggacaaagctcttcgatgtctttcgcgatttccagaataaccgggatggtgcgcagccctttgaataaaccgcccggaccgtttgtctcctggccgattacgccgtattttaacggaatccgttcgtctttggcgcgggcctcaagaaggccgacgcggaattgagtcgttacgaaatccgcatccttcaaagcttctctccggtcaagcgtcaggtgaatctctatcggaacacccgctttttcgaccatgcgttttgcaagcgtgccgacaatattgagttttttctcgccttcgggaatgtcgacgagccataattctctgacaggcagttcctcatagcgtttaatgatgccttccacaagctccggtgtatagcttgaacctccgccgatcgttacaattttaattccttttgtcatatttttgctcccccttgcagactcactttttcgtaaatctcgactaactcagcggccaagtctttcacggtcatggcattcattaaatgatcttgcgcatgcaccatcaaaagcgtcatgtctgttttttctccgccggcttcattttggatcagttctgtctgataatgatgggcttcggtcagttcccttgcggcttcctgaagcttttcttccgccatggctctgtccccccgctttgcggcggcaatggcttccattgatgcgcttctgccgttgccgccatgcaggatgatctgaaaaatggtctgttccattttttcattcatgtgtttcactccctttctctacagcacggctttttcgtctccctgtacggctggcgcctgcgattgttcaagttcgttttcttctttcagcttttgcgaatcccacattctgaagaacggatagtacacgataaaggctgtgatgatgttaatcgcctgcatgacagcccctgatatttttccgcccgtggcaagatagccggagaaaatcggcggcatcgtccatgggacggcaatgccggcaggtttggcgacgaggccagtgctcatgccgatataggtaaggaccagtgtgacaagcggcgtgataatgaacggaatgagaagcatcgggttcatgacgatcggcattccgaaaataatcggctcattaatattaaagacggccggcccgatggcgagtttcccaagctgcttcatctgcttgcttcgcgaacggagaaacatggtgaccacgagcgccagtgtcgcgccgcttccgccgatgttgatccagatttcaaaaaactgctgggtgaaaatattcggaagcgcatcgcccgcctgaaacgcaatccggttggcatccatcgctccgaaccagatcggcgccatgacgccgccgactatgttcgccccgtgtaatccgcacgcccacaagagcatttgaaccgcttcggctatcaggcttccgccgagacttcccccaagaatcgagagcggtgtacccagtacaacgcttacaatgttatgaaggctttcaaacggtgtcgcttcgacaattaaacgcgcgccccagatcagaaagatgacggcaaaaccgggaattaaagcgataaacgatttgctgaccgcaggaggcacgccgtccggcattttgaagacgaaattccgctggatgatcaggcggtaaatttccgtcgacagcatggcgatgatcatcgcaacaaacagccctttgcttcccatgagagacagcgggatgccgccgccgaccatgatttcctctttggcgccggaaggcagaaacggaactttgtacggcgttgccaagagaaacgccgccaaagatatcgcaccggccgataatgcatccaccccgtatttttcggccaggcggtaggcgattccgaaagcggcgacaagacccatgatttcaaaggtcgcatcaaccggatattgcagtttttgagaccaggcgcttccgaacgtttttgccatgaaatccgcatatcccggaatcggcaggttgccgatgatcagaaaaaacgaaccgatgatgataagcggcatggtgaggatgatcccgtcacgcaatgcttgcagatgccgctgggaggcaatttttccggcaatgggcatgactttctcttctaaaaactggttcaccttattcacacggcccgcccctttctacgatgcgtttccgagctgttccgctgatttcagaacctccgctccgttgcatgtgccgtaatggacggtattgatgacttcaaccggcactccttttgattcacccaattttttcagctgcggaagcaaataacggacttgaggcccaagcagcaatacgtccgctttatcaatatgctggttgactgaatcgcctgacaccgcccagattttatattcttttccttgttcctgcgcgcttttttccatcttggtgacgagtaagcttgttgacatccctgctgcacaaacgagtaatatattcatgtaaaagacctcctgaaagtttgatattttgtatgtctcgatgttagtaccatcatattatgaaatcgctttcataactactcaggctttttccgctgttaacggaaaaaaggtgtatcccggtctttctctgatcgtttgtctctgaatactcgtaaaacctcctgataggctgtgcattttaagagacggcttaccgcggccggatcatctaacatcccgccgagccatttgtacatatgctggaggtcggctttgctttctttctcgacgcagagcaggcagacaaattggacacgcttatccgcccagtcaatcggcttcttcagcgtgcataccgcccaaaacgtcgtgtctgtctgcggaacgagcgggtgcggaatcgccgtaagattgccgaaactcgtaggagaaatcgcttccctttcaaaaatagaatcggtcagagaatcagaagcgaggccggcttctgcaacctgctgtccgagaaaacggatgacgtcctccttcgtctccagatcctgctgcaaaaataccagctccggtttcagaaagttcaattgttcccgcttttcttccagcatggcgtcgatttttgtaaaatccccgccgcccaacagcgtatgaaccttcaacacgggaacgggcaggtcttttttgatcggcactgtgctgaccacaaaatcaatcgactcaaaggaaagctggtcaaggctgcagtaatcagccgttccgacgatttcaagacgctttgcgaaccgggaacggagcttttctcttaaaagctgtgcgctgccggcgccggacgcacagacaatcagacagcgtttaggcggccgttccgtctttctcctttcgatggcggctccgaaatgaagcgccaaatatccgatctcattctcatgaatatcaatgccggtttgctccttgatcacgattcccgcaatcactcccgcttcaaatgcgagcggataattttcctttatggcggagagcatcgggtttctcaggttcattccgtaccggtttcggttaatcgccggcttgatgtggagcgcaagacccgctttcagctcattgtcgtccgtgattccgagcttcagctcccgctcaatggcttcgatcatggcctccgtcaaacggctggtttccccgtctatcagccttgtaagctcttttccttccagttgtgactgggtcatgcgctttgtcccgagcaggtgaatggcgatataggcggtttcctgttcgggaaaggtgaccgaaagcgccgattcaagctcttttacgatggcttccgctgactgatattctgtttcaagcttaatatcatgaagatcttccggaatgagagatacatagttttctgtccggattcgtttgcaggcaatggcgatatggatgatgagattgttcaggccgaagaaagaaagcgggatcttatggtttcgaacctgcttcataatggctgtgcggatcacatgaatgtcgtctttcggcagaataccggccttttcactcaggagatcaggctcaggctcgcggtcgtccactaagtattccgccatacaataacggaggcggagctcttcgccgcgcagcttaaagccgtagttcggccttgtttccaaaatgatgtcataggggcggagccgttttttgacttcttttaaatcagattgaagtgtggatttactgatgaatagttcttccgccaagtcatccagcttgaggtagccgtcggccagaagcattcttttcataaggtaatctatccgttcatcgggaaaaatcggcacggtgctgttctgctggaaattgtcctgaagccagtttttaaacggctgctcattccggatcagcagcttatagccgctccctctgacagattgaatggatgcgccgtgtttttctacaatggtttgcagttcctttatgtcattgcggaccgtccgcgtcgttacctttacatttgcagcgatgactgagcttgtaaccggtgtttcagcagctaaaagcaagcgcaaaagttcacgaagccgcccatgaagcatgagaaaaacctcctatcagatcagatgcagacgtgaaaaatgggcaaaaagaatgaggaaggggtaaatgtatgtaaattctataatggggaggatttcaagtcaatgcggcaatccgatgccaagcccgtaaaaaaacagccggatcagccggctgttcgggatgcggacatgcggttccgcttagatgccttccgttcttttatgatttttctgatgatcggatagatgacgggcgcccatttgataatcgttttgaaaaattttttcaatgtctgaatcccctttcttttaccttgtctttcccctgttatcagcgtttataaacatggtcagcgtgagacataccggttccctgtcacccaatagcgccacggataatcccgggcttctccgctgttgtcaatcccgattctcgggcctgttgatatatgctcaggcgtaaagccctccgtaatatacagcggcggttccgtgatcatgccgccgtagtcgttcattgaaatgcccatcgccttcgtcagttttcccgggccgtttgtccactctctcgggggtctgcccggtctcctgctctccatcaggaactgtccttcatgaggctccgccgccctgattaacacggcctgcggaatgccgatgtccgcggcgacgacgttcattaatgtatgagtgtgcatgacgtatgtataaatgcggcccgcctcatggaacataatttccgtccgtttcgtgcgccggttgccgaagctgtgcgccgcccggtcttccgctcccatataagcttccgtttccacgataaaacctgaagccgttccctcatccgtctccttcaccaagagacagccgagcaataaaggggcaagctccactgacggtctctggtaaaattcaatcggcaaaggctttcgttctcctgccatttgcctccctcctttctgaatatagcgatttcctctttcacgtttttcacttcttttttacaatataaacatgagagaaaaaaggacattattgttgaacgctctattgcgttttgaaaatcggctcggtataatatgatggttcaaatgaaaatgattctcatgttcaataaataccggaccatgatcataaaagtaggtgaattgatttttgagcgattctgtcaggtccgcaaaccgtctgatcagcatcttaaaaaacggggttttcttcctgatcgcggtgatcgggctgcttgtatctatttttttcgccgtctcattcggtgcgaaagacattactttacatacggtttggtcggctgttgctgattacaatccgaatataacgggccagcagatcattcatgaattgcgtcttccgagggtgctcggggcggccgttacaggagccgcttttgccgcagccggcgccctcatgcagggtgtcacgagaaacccgcttgccgattcgggtgtcttaggcgtaaacgcgggcgccatgtttgttgttgcgctcagttttgcttttttccctcatttgtcatacgccctgctgatggtgatgtcatttttgggagcactggcaagcaccagcttgattttctttatcagtgcggcgggaaaaggcagcatgacacctttaaaggtaacgcttgccggggcggtcgtggccgctcttttacattcactcagtaccggtgtggcgatttattacgatttaagccaggatttggccttctggtacgccggcggggtgtcagggatcaagtgggctcatttacaagtccttgttcccgtgattgcgatcttcatcattctcgcgacattcatgggccggtccgtcacccttctctcaatgggaaatgacgtggcggcgaatttaggggtgaacacggctctgacgcgtgccgccggattaatgatcgccgtcgttcttgccggtgtgtctgtttctgctgccggcgcgatcggctttgtcgggctggttattccccatatcgcgcgaaagatcgtcggcgttacgtacaggctgattattccgatgtccgcgttactcggcgcgattctattgattttggctgacctggcctcgcgcacggtcagtcccccgagggaattggcgataggcattatggtcgcacttgtcggtgtccctttctttctttatattgcccgcaaggaagggagagacttataaatgaaagtgcagaaagaaacaaaaaaagcggcggcggcaggactcattctgctggtcatcgccgtttgcattattctgatcgggctgcatacgggctcattccggctttctcctctcacggtgggaaaaacgctgttcggatacggcacgtttcaaagcacaaccgttttattcgattaccggcttccccggattctggtgacgatgctggccggcatcggtttaggagtgtcgggcgctattttgcagggtgtatcccgaaatccgcttgccgatccgggcattctcggactgcatgccggcgcttccttcggtttgatgatgtatatcacgttctttcattccctggaggcgcaggcatcgatgttcatcccgctgtttacgtttgcgggcggaacactcgccgccctgctgatcgtagtgcttacgtacgacaggctgaacggttttttaacgatccgcatgctgttagtcgggatcgccgtttccgcgggcttcagcgccgttacattgtttatgtcgctgcgcctgaatgaagaaacttatacattcgcttcccgctggctggtgggaaacgtctggggcagggattggattcacgtgtggtcgctattgccctggatcggcattctcgcaccgcttgcatggctgaacgcccggtctttgaatattttaatgctcggtgaccaggcagccgcggggctcggcgcacacgtgcagagaaaaaggatcatgctgatcgccatagcggtcggcttgtcctgcgcgagcgtcgcgatggccgggggaatcggctttatcggctttgccgcccctcacttggcaagacggctcgtcggcaccatgcatcagcatattatcccgattgcgggattaatcggactcgtcattcttgtcgcggcagacaccatcggccggtctttgtttcagccgaacgccattccggccggcgtggttgcggcagccatcggcgcgccgtattttctctatctcgtcatgaaaatcaaatcataaaacaaggagtattcccatgaaaaaaataattgcgctcgtcagtttcatgtgtattttcttattggctgcctgccaatccgactcaacacagccggagtcaaaaaagaaatccggcgatcataaaatcgcttcgatgtccattcacctgacaaatgatctgctggctctcggcgttacacctgccggttccgtcgtgggcggagaattgaaagattttctccctcatgtgaaaaatcagctgaaagacacgaaaaaactcggacctgcctcagacccggatatggaagctttacttgagctgaatccagacaacatttatcttgataaagaatttgcggggaaagatgtgtcaaaatacaagaaaatcggaaacacacacgttttcgaccttgataaaggcacttggcgcgatcatttaaaagatatcggaaaaatcgtcaaccgtgaaaaagaagcgaaaacatttattcaagattacgaagatgaaacaaaacaagtcagatccatgatgaataaggaattagggaaaaacgccaaagtcatggcgatccgcgtgaacgcaaaagagcttcgcgtcttcagcacacgccgtccgatgggaccgattctgtttgacgatctgaagctgaaaccggctgacggcattaaagaaatgaacacctcccgcccttatgaagtcatttctcaagaagtgctgcctgattacaacgcagatgcgattttcgtcgtcgttaacagagacgacaaatcacagcaagcctataaagaattgcaaaaaagcgctgtatggaaagggctgaaggccgtgaaagcaaaccacgtctataaaattgccgatcagccttggcttgattattcagcactgggaaataaattagcaatggatgaagcgaaaaaactgttccaaaaataaacacgagccggttttgcaaaaagtgcaaggccggcttttttatattgtcgtttacttatataaacatctgcttatataatagtgtaaaaaaggagtgagcgcatggaacgaaggcatcatgctttaagttccgaagggatcagccagtgcctcaaacttctaagcgacccgacgaggcttttgatgctgaagcttctgaaggataaggaatattgtgtctgcgagctgacagctatttttcatataagtcagcccggcatcagccagcacttgaggaagttaaagaacgccggccttgtgcgggaaagacgcgagggccagtggcggtactatgccattcatccgtccggtccggaatacgcgctggtttgctcgattctgcagcagatagatgaaaaggacgaagttttacagacattgcggcaaaaagaagtcactgttacatgccggtaagggggatatattcttgggagttgcggttttatcagcgctgatttttatgctgacacttgtgtttgtcatatggcagccgaaacatatatcaatcggctggtctgcctgcggcggggcggtcctcgctttgatcgccggagcagtcagcctgcacgatatcgcggaagtgacgggaatcgtctggaatgcgacacttgcctttatcgccattattatcatttcattgattcttgacagtatcggtttttttgagtgggccgcgctgcatatggccatggcggccaagggcagcgggctgcggatgtttctctatgtgtcggtcttaggggctgttgtctccgccctgtttgccaatgacggagcggcgctcattttgaccccgatcgtactggcgatggtgcgggctttgaatttacctgaaaagctggtttttccttttattatcgccggaggattcatcgccgacaccacctcgcttccgctcgttgtaagcaatttggtcaatattgtatccgccgattactttcatatcggatacattgaatatgcatcacgcatgctggtgcccaaccttttttctctggcggcaagcattttggtgctgtatctctatttcagaaaaaacattccgaaacggtatgacaccggtcttgtgaaacatccggcatccgcgattaaggatgaacgccttttccggttatcgtgggctgtgttggccgttttattgatcggatatttcgtcagcgaactgctgtcgatacccgtttccttcgttgccggctccatcgcggtcatttttctcattctggcgcagcgaagccccgccgtccctgcgaaacaagtcatcaaggacgccccgtgggccatcgtgtttttttctgtcggcatgtatgttgtcgtgtacggcttgcggaatgccggactgacggatcttctttctcagcttatacagaaagcggcggatcacggtttgtttgcgggcacactcggaatggggtttatcgcggcgatcctctcctccgttatgaataacctgccgacggtgatgattgacgccatagccatcagcggaacggacgctcacgggctgatgagagaagcattgatttacgcgaatgttatcggttcggacctcgggccgaagatcacgccgatcgggtcgctggcgacgttgttatggctccacgtgctgagccggaaaaacgtgaaaatttcctggggaatgtatttcaagacaggtctgatattaaccattccgacgttattcatcaccctgatcggactttatttatggctgttatggctcgcttgagatgaaaaaccttttaagttgaatcttaaaaggtttttttgtgtcaaaaatccgaaaagtaaaacttttatattttaaaagtatagacatttagttttaaaagattataatattcatgaaaacgttttaactttatgaaagaagggatttctcatgaaaagaattttattagcctgcagctcaggcatgtccaccagccttcttgttacgaaaatgcagaattacgcccgctccatcggtgaggaagccgagatttgggcagtcggacaggataaagcaaaagaagcgatgaaagatgcagacgtcgtactgatcggcccgcagatgagttttttaaaaggtgagcttcagaaagaggcggacccgcttcacatcaccgttgatgtgattgatatgatggcatacggcatgggagacggcaaaaaagcatacgaacaggccgttgccttgattgagaacaaataaaggaggcgataagcatggaaacgtacacggatgaacagatcagttttcagctgattcttcacagcggcaatgcccgcagcaatattattcaatcgatacgcgcatataaagacggccggacagatgagtcagacacctttctgacaaaggctgaagaagaactggggaaagcgcacgacatccattttcagatgattcaaaaagaagccggcggcgccaagacggatgtctctctgctttttatgcatgctgaagaccacttaatgtcagcgctttcaatgaaagagctcgtcaaagaaatgctcgatttatttcaatcaaagaatttataaaaagccgggggtgaagacgtgtttgagaaaatcagccaattccttgttccgatcgcgggcaaattaaacaataaccgctacttgcaagtcttacgggatgcttttatgctggcgtttccgctgaccattttcggttcggtgttcgtcgtgctgacgaacctgccgtttttaaacaaaatcatgagcagctccgccctgtctgtctttcaatccggatttggcggcgcttcgacggcgacgatggggattatgtccatttttgtcgtcttcgggatcggctattacctttccaaaagctacgaagtggaggccgtattcggcggagcgatcgcattggtttcttttctgctgctcaccccgttcgttttagagccggaaacgggcaaagcggtcgcaggcgtcattccggttgaccggcttggagcaaaagggatgtttctcggcatgatgaccgcatttttgtcaggtgaaatctacagaagaatcgttcagagaaacttaacgattaagatgcctgccggtgttcctccggctgttgctaaatcgttcgccgcattgattccggcttttatcacgcttaccgtcttcctcttgatcaatgcggctgtcacccagatctttcacaccaatctgcatgatgtcatttatcatacggttcaagccccgcttgtcggactcggaagcggtatcattcctacattaatcgctgttttctttattcagattttatggtttttcggacttcacggacaaatcattatcaattccgtgatggacccgatttggaatacattacaggtcgaaaatttagctgcgtatacagcgggaaaagagattccccatattatttctaagccgtttatggagatttacaccgtcggaatgggcggaaccggaatgacattggccatagtgatcgccatcttgctttttatgaaaagcaaacagatgaaacagatatccaaactcggtctcgcgccgggcatcttcaacgtcaatgagccggttattttcggtttgccgatcgtgatgaacccgatcattatcattccgtgggtcatcgcgccgatggttgtcacccttgtcacctacctggccatgtcggcggggatcgtgccccctcctaccggcgtgaccgtgccttggaccgtcccccttttcattaacgggattatggcgaccaattccgtcatgggcggcattatgcagctggtcaacctctgtattgtgtttgtcatctggttcccgtttcttaaagcgctggacaaattaaacatggcaaaggaaaaagaagctgagaccgagcagcatgcccgggatgacagcatgagtatgtaatcaaaatcgcagtaagggagagaaatcaattgactgaatcaaatattcaatatcgttttccggaaggattctggtgggggtcttccgcctccgccacccaaacagaaggcgccgctgacagagacggaaaaagccaaaacatatgggagtactggtatgaaaaagagccgagccgtttttttaacggcgtcggccccggcgacacgtcacgtttttacgatcaatacaaggaggatatccggctgatgaaagaaatcggccataactccttccggctgtctatttcctggtcaagattgattccggacggaactggcgaggtcaatcagaaagcggtcgcgttttatcaggacgtcatcaatgaaatgcttgcccatcgcattgagccgtttgtcaatttgtttcactttgacatgccgctcgcccttcagcgtaaggggggctgggtcagccggaacaccgttgacgcgtttgaacattacgccaaaacatgcttttcgctattcggtgacaaggtgaaaaaatggttcactcacaacgagccgattgtgccgattgaaggcggctacttatacgactttcactacccgaatcacgttaattttcaagaagcagtgcaggccggtttccataccctgctgtcgaatgcaagggctgtcaaagcctacagagaattgaaacaggacggacaaatcggaatcattctgaatttgacgccttcttatccgagaagctcacatcctgaagatgtcaaagcgtcccggattgccgacgcctttttcaaccgctcatttttagatcccgccgtaaagggcgaatttcctgaggagcttgtcgagattctcaaggcggaaggctttctgccgcgttatgagaaagaagatctccgcctcattcaggagcatacggtcgacctgttaggcgtgaactactaccagccgaggcgcgtcaaggcaaaagaacatgttccgaatccgcatgcccctttcctgcctgagcgtttcttcgacccgtatgtcatgcccggccggaaaatgaaccctcaccgcgggtgggaaatttacgaaaaaggaatctacgacattctcaccaatctcagagaacattacggaaatatcgagtgttttatttccgagaacggcatgggagtagaaggcgaggaacgcttccgcgatgaaaacggcatcattcaggatgattacaggattgaatttatccaggaacatctcaaatgggtgcatcgggccatcggagaaggttcaaatgtaaaaggctatcacctgtggactttcatggacaactggtcttggacaaatgcttataaaaaccgctacggctttgtatctgtcaatctggaaaacgggggcgaacgaaccgtcaaaaaaagcggccgctggttcaaatccgtttccgatcaaaacggattttaacagatgaggagggacggccatgcttggaggtattgaagccggcggcacgaaatttgtctgtgccgccggacaaagagacggcaccattctggacagagcagagtttccgacgggagaaccggatgacacactcagacaggtcatccgttactttaaagatttcccgatagaagccatcggcatcgggtcgttcggaccgattgatatccgtcctgacagtcaaacatacgggtgcatcaccgcgacgccgaagacagcctggcggaactgccctattcttcaaacgatcaaaagcgctctgggtattcccgcaggcttcaccaccgacgttaatgcagcggcgctcggagaagcttctttcggcgcggccaaaaacacggacagctgcctctatttgacggtcggcacgggcatcggcgcgggcgccattatgaacggcagatttgttcaagggctgtctcatcctgaaatgggccacatttatgtcagaagacatccggacgacggctacaaaggcaattgcccataccatacagattgtctggaaggtctcgcggcaggccccgccattgagaaacgctgggggaaaaaagcatttttgctcacggatcagcaggaagtgtgggagcttgagggctattatattgccgaagcgcttgtgcagtatattctcatactttcgccggaaaagatcattctcggcgggggcgttatgaaccagcggcagctgttctcttctatccgtcagcacgtgaaaaagcggctgaatcaatatattgatctgcccgatattgaacacttcatcgttccccctcaattagggattcactccggcgcggccggttcgctcgtattggcggagcaggtcttagaagcggcaaaccgggaggcgggaaaatgacgaaactcttatttttggaaccggtttttaaagaaagattatggggcgggacgaagctgcgcgatacattcgggtatgagattccttctgagcggacgggagagtgctgggcgatttcagctcatccgcacggcacatccattgtgcggaacgggcctttttccggaacatcattacagcgtctctggagtgaacaccctgacctgttcggacatccgaaagaagaggcttttcccctgctcacaaaaattcttgacgcaaatatggacttatccgtgcaggttcatccggatgacgcatatgcacatcggcatgaaaacggagaactcggaaaaacggaatgctggtacgtgttggactgcaaaaaagacgcggagctcattttagggcatcgcgcccaaacaaaagaagatttcgttcggcttattgaacgaaacgagtgggatcacctgctccgccgcatccccattaagcccggcgactttttctatgtcccgagcggcacactgcatgctttatgcgaaggtacgctcgttcttgaaatccagcaaagctctgatgccacctaccggctttacgactatgaccggacggatgggaacgggaataaacgcgagcttcatcttcagaaagcaattgacgtaacaggcattccgcataccgatgaaaatgtaaaaagcacaaagcatcggatcggagatgctctgattacgatactcgccgaaacacctttcttttcagtttatcaatgggatgtgagcgggaaagcatcattccccgcacccggccggtatttactcgcaagcgtcacgaaaggacgcggagaactggatggatgccccattcacaaaggcgatcactttatcgtgccggcggattccggagattttgttatagaaggagattgtgaggttatcgtttcacatccttcatcatcttaaaaatcaggaggtcttttatatgctcaaaaagttagcagtctgcctgtctatcgttttattactcttaggagccgccagcccgatatcggctcacaccgtttatcccgtcaacccaaatgcccagcagacgacaaaagatatcatgaactggctggcgcacctgcccaaccgttcagaaaacagggtcatgtccggggcgttcggcgggtacagcgatgtcactttttcaatgacagaggaaaaccgcttgaaaaacgcgacgggacagtctcccgccatctacggctgtgactatgggagaggatggcttgaaacagcggatatcaccgattctatcgattacagctgcaacagcagcttaatctcatactggaaaagcggcggcctccctcaggtcagcctgcatctcgcaaatccggcttttccatccggaaactataaaacagccatctcaaacagccagtacaaaaacattctggacccttcaactgttgaaggaaaacggcttgaggcgctgctcagcaaaatcgccgacggccttactcagctgaaaaatcaaggcgtcaccgttctgttcagaccgctgcatgaaatgaacggcgagtggttctggtgggggctgacaggctacaaccaaaaagacacggaaagaatctcgctgtacaaagagctttacaagaagatataccgctatatgacagagacaagagggttggataaccttttgtgggtgtattcgccggatgccaacagagactttaaggcagacttttacccaggctcatcttatgtggatattaccggtctggacgcttacttcactgatccgtatgcgatatcaggctatgatgaaatgctgtctctgaaaaaaccgtttgcctttgccgaaaccggtccgtccggcaatatcggaagctttgattatgctgcttttatcaaggcgatcaggcaaaaataccccgagaccacgtactttttgacatgggatgaacaattaagtccggcggccaatcaaggcgcgcaaagcctttatcaaaacagctggacgctgaacaagggcgaaatatggaacggcgggtccttgacgccgatcgcggaataaccgcttcttttgaaaatcggttttaagaaacggctctgctgggcatattgttaccgttcaaaaaggagggttcaacaatggaaaataacaaaaacagcgaagaaacgctttccagtaagacgaccggtaaaggcgagtcagaagacacgctgacaaaccggcagggccatccggtcactgacaaccagaatgtcaggacagtcggcaatagaggaccgacgacattggagaattatgattttttggagaaaatcagccactttgaccgcgaacggattcccgagcgcgtcgttcacgcgcgcggcgccggcgcacacggatactttgaggcgtacggaagttttggagacgaggagatttctacatacacaagagcgaaagtgtttcaaaagaaaggaatgaaaactccggcgtttgtgcggttttctaccgtcaaccacggaaagcattccccggaaacattgcgtgatccccgggggtttgccgttaagctttataccgaagacggcaactgggatctggtcggcaacaacttgaaaatcttttttatccgtgatccgctgaagttcccggatcttgtgcacgcatttcagcctgatcccgttacgaacattcaggacggcgagcgtattttcgacttcatttcccaatcaccggaagcgactcatatgatcactttcttgttttcgccgtggggcatcccggccaactaccggcagatgcagggctcaggcgtccatgcctacaaatgggtcaatgaagaaggaaaagccgtgctcgtcaaatatcactttgaaccgaaacagggcatccgcaacctgacacagaaggaagcggaagagattcaggggaaaaactttaaccatgcgacacaggatttgtatgaagcgattgaaaaaggcgattaccctgagtgggaagtgtatgcgcaaatcatgactgatgacgaacaccccgagctggattttgatccgcttgatccgaccaagctgtggtataaagacgatttcccttggaagccgatcggtaaattggttctgaacaaaaacccggaaaactaccatgccgaggtggaacaagcgtcattcggaacgggcgtgcttgtggacggccttgatttttcggatgacaaattacttcaggggcggacattctcctattcagatacccagcggtaccgcgtcggcgcaaactacctgcagcttccgatcaactcgccgaaaaagcatgtcgccaccaaccaggaaggcgggcaaatgcagtatcgggtcgatcgggcagaaggacaaaacccgcacgtcaactatgagccgtccattatgggaggactcaacgaagcaaagcaggatgggaaagaccatacacctcatgtcgaaggcgatgtgaagcgggaagcgatcgaccggtcgaataacttcggccaggccggagaaacataccgcagattttcggaatttgaacggaacgaattgatcacaaacctggtcaatacgctttcttcctgccggaaagacattcaggatcaaatgattgagaatttcacaaaagcagatccggactacggaaaacgtgtggcggaagggctgaaaaaagcctccgaaagcaacagcggcgggccgatcggcactactgatacagcacaagccgcaaaacaggctgaacaggaaagccatccgtctgatccgtattaaataaaaaaacaggacaatcgcgtcctgttttttttgagctaattcagctcctgtatattctgctccgccgcggccgcaaatactttcggctccggacggtcaagatcttcatggaataaacttactttgtgaatctgccggttgtcgtacagatgaaagtagtagttcccggtgtcacagcacatgaccgacgtatactgcgtataatcaatttcattctcctctgtgatcaccgcgccttttggaatattcacattggacagcacgtgaaaagcggccgtaacgccatccgtttcatgagcggcaggctctaaatgctctttcagataagcggctctgatgaatcgggatggcggcgtgtaatcaccgggaagcccgatcgttccagatccttggccgaaagcggttaatgtcattccgcccaatgttttgctttctgactgctgcggcctgattccgatataatggcgcagattggtcacatgccaaggaaattccggactgttggtcatcactccgggtttgttgtcatatactttcattccctccggtgtcggctcgatgacaatgcagccgcccgtgcggtctgataaaatccaatgaagaggcagcaccgtatccaataacattaacttcttctctacaatcgtcagcattgagagcttttcctttatgtcttcaagagattcacagtttgataaggcccaggtgacaaactcatgaggagcgatgtgacaggtgccctcccgttccgctttctcgtatcccgcaaagcccggaaaatacagcgtcgcacacgacagccctttttcatttacgccgtcggcaaacagaacattgccgagatttctccccatgccgataaatgcgtatttcgtcttatgcatcctgccgtcagcttcgcttttccagctgtactgacgaggataaagcacgacgtccgtcccgagctgaaatgcaaaatccatcgttcgcgccaataggtgattaccgtctgtcgttttcaatgtaagacttgtacacatatcatcaatccccttttcattaatgaaatttacacaaagtaaactattcttccagcttaacgaataatggctccattcgtcaaaagattgacacatttctccttaatacatattagtccgtaagcatatccatgccttttaaaccctggcaaatcgttttggcggcagtgtttgttccgttttttcaaaaaaattttgaacggctgtcaacgaggctttacattgtttttcctgcatgctggaatttgtaaacggcaggtcaatctgttaagctatgtctttatgttaaagaagaacatacggaggagattatctattgaaagtagaaaggcgaacgattgaacatattccgcatgacgaaagacacggaaaggctaaagatttattccccgtctggttcggggctaatatgcatattacgacgttagtcacaggcacactgcccgttacaatgggactcgatctcttttggagtatcgccgccattattatcgggacctttatcggcgcaatctttatggcgtctcattccgcacaaggacctcagctcggaattccgcaaatgattcaaagccgcgcgcaattcggcgtgatcggagcgattctgcccctctttttggtcatgtttatctacctgggcttctttgcgagcagtacgattctcgcagccggtacactgagcagctttgtaccgattccggcttcatggtgtattatcggcttaagcgccatctgttttttactcacgatctacggtcatgatctgattcacaaaatgcagaaaatcctctcttggacctcctttgccgttttttttgctgcaacgattcttatttttcaactgccgattccttcgggaagctgggtgcccggctcattagacctgcctgttttcctagtggcggtcagcgcggtggccacatggcagctggcatacgcgccatatgtcgcagattattcccgttatctgccggtcaaaacaccggcatcgcatactttttggtacagctacgcaggtacgtcagtcagttccatctggatgatgcttctcggcgccattttgacgacggcgctcccggaatttaccgctaatgcgggaaatgagattgtccgattgttcggtccgttttcctttattatgctgatcatcgtcctgttcgggcaaatggcgatcaacgtctttaatttatacggagcctttatgtctacgacgactaccttagagccgtttttaaaactgaaggtgacgccgaaaacgagagtggtaatgatcctttgtgtgacggcagcaggtactgtattaagtctcttgggccaaagcaatttcatggaactgtttttaaatttcatctttttcatcagttatttcttaattccatggacggcgatcaacctcgtggattactattttatccgccgcggaaaataccacgtcaaatcgatgtttgacgtcaacgggcaatacggcagggtcaattggattacagcggccgccttcgttttgtcgattatattagaaatcccattcatcaatacatccttctacatcgggccgctcgctgaaatattcggcggaggcgacattgcctgggtcatcggcctggccgttccgtcgctgctgtattatgtcctgatgaaatcaagggtaaaacaacaagaggcgccttctctatgaagacgccttttctttattcatattccttccatacacgcggcagcagttcagaaagttcgtgcgccaataaggtatgggcggagcgctctttcgtccataactccgcacattcaccgtgaaggcggacggcgttcaatacggcatgcttcgggtcttgatgacagcacagcatgccgagaatcattcccgtcagcgtgtcgccggtcccgccttttgcaagcgcgccgtttccggttgtattcctgcggcattccccgtcgggaaaagcgataatggtttcgtttcctttcaggacaatcgtggcatgaagccgctccgcccattccgcggcatatcccgctctgttctgctgaatctcttgaatcggaaggcctgtcattctggaaaattcgccgggatgaggcgtcaagatcacgggggctttcctctttggataggttcttttcgttatggcgcccgcgtccagtatgacgggataatcggcagaaagcagctgatcagccgcctgctgcacttcgtctgtttgaagaaggcccggcccgatggcagcggcccggatggtttccccgggctggcccgccgcggcttttttccagccgtcccgccagtacgtcgcttccggcagcaccgggacgataagcggaatgacgcctgccgatgtaccgatgacgagcttgccgacaccgcttctcatcgcgcccaatccggccagaagggcggctcccggcatgtcatcgctcccggccagcaataacgccgtcccgaacgttcctttatggctgtctgcctcccgttgcggcagcgtatctttcacatcctgttccgtccaatccattatattcatctctgtacctcctcttctgtctcctatttatattccaaacaagaagagattttaaaccgcacaaaaaaaacagccgctcgtttgcggctgtttatgttctgatcggaacatcaagacggtaaagcttccggtaccgttcgttttctgcaagcagctcttgatgggttccttccatttctgcttttccattttctaaaaagacgattttatcagctgtttccacacccgctaaatggtgtgtaatccagaggatcgttttctctttaaagacatcaaaaatcgtatcaagcaattcgcgttcagtgaccgcatcaaggccgaccgtcggttcatcaaggataatgaccggcgtgtcttggagcagaatacgggcaagcgcgatccgctgccgttccccgcctgagaaacgaatccccgtctcctgcacggacgtttcatatccgtcaggcagtgattcaatataatcatgcagcttcacttgccgcgccgcacgcttaacatcttcatcactcgccttgccgtttccgagccggatattgttcataatgctcgtgttaaagagatgaggtttctgattcaaaacggccaccgctgaggaaatctgctcctgcacggccgcagtttccagcccgttcagcatcactttgcccgaatcgggaactaaggcgccttcaattaaagcgagagaggtcgacttaccggaaccgctcctgccgagcaacgccattttttcaccttggcggagagtgaaggaaaaacggtcaagcacatgactgtgctgatcataagaaaacgtcacgttatcaaatgtaagtgtcacatcagatacatccagtttctcatccgtctgcttcacctcacgacttcgcagctccggagccgccttactcattcttttgatggaatcctgataagaaggcacttccgtcagcgcatccgaaaggggcagaaacgcctccgtcaatggaaatacgacaagcacaaaggccgcgatcatcgtgttggcgatgctgccgtccgcatactgacccgccgtccagaacagcatgatcaatatgaagccgccgacaagacattgcgcggcgagatcacgccatcttgtaaaccgctgacgtttgctttcaaggtcaaaccatgccttctctttctcttcataagaggaaataaaggccgcctggcgtcccgaaaacatccagtcgctcacgccgagcacggcatctgtcagccggctgtagagcatattccggccgcttttcagcctcatgtttttcgctctcgtcacaagaagcgacacaaccggaaacaatacaaccaatataaacaggtaaatcgccgcaaaagcggcaaacggccaggaaaaaaagccgagtccgataacggaggccgcatacagcagcaaagcggaaaccgccgggaaaatcgtttttaaaaacgcatcctgcaaatgctcaatatcctcagccaaaatgccgagcatgtcgcccgtccgaaaacgggatgaaagcatgagcgaggccggctccagcatattgtaaagccgcaccctcatgtcggacacgattttcaaaatgatatggtgccccgtcagacgctcggcgtaccgtgagactgaacgggcaatcccgaaggtccgcacggctacaatcggaacgtacaccagcaggatattctcaggcctagtcgccgacttagagatcaaaaaaccggaagtgaacatgagaaaggccgccgaaaaaatcgtcaccgcgcctaaaaaaatcacaagaacaaacaaacgggcattttgcttcatatacggcagaatccattcttcttttctcatgttctttcccccagttgcgcctttacaagtttggcgtatacgccttgtttcgccatcaattcgtcatgggtgccgatttccgccaccgcgccgtcatcaagcacgataatttcatccatctcaagcatccagtgaagacggtgagtggccagaaaaacaagcttattttcaaacaggtctttcatcgtttcttttatttcatattctgtttcaatatcaaggtgagcggtcggctcatccaaaaggagaatcggccggtttcctaaaaaggctctggccagcgcgacacgctgagcctgccctccgctgagcgcccgtccgccctcgccgatccggccgtcaagaccgccgggcagatcacggatcagtccggaaagacccgccgatatagcggcctgcgccgtgtcctcacgcgaagcatcaggatgataaaaccggatattattcaaaagcgtgtcatcaaaaatatacgggtgctgcggaatataaagcagctgcttctgccagccgtccgactgcagatgcgagcgggattcaccgtttaccttgatctcaccggacgcaggctctaaaaagccgcccagcacatcaatgagtgtcgattttcccgcaccgctttccccgataatcccgattttcttcttccctttgaaggacagatgaaattcagacatcgattctcggacggacaaacgcgtaagctgtaattcatccccgtcagtccacgtatcaagttcgagcggcttttcttctttaaaaccgggctgcgccaaaatcgcttgaatggttttccccgcctcctgcccgtttaacgtcgcgtggtaatcatttcccacttcgcggaccgggagaaaatattcaggcgcgagaatgagcgcggtcaatgccggcccgagcagaatttgtccgtctatcagccgcaagccgagaaacaccgccactgtcgccaccgacagcatcgtaaagaaatccagggcgaatgatgataaaaacgcgacccggagcgtgctcatcgtcgccttgcggtatctctcactgacatgaaagatatttttactgtgtgatttgcttaatcctaaaaaccgcaatgtctccagtccgcggagcgaatccacgaaatgattggaaagcgtctgataggacttccattggcgatcggcttttttctgtgccacaagtccgagcagaatcataaatacaatcaaaatcggaagcgcaagaatcagaatcaatgccgatgttttatcctgaaaaaacacgtaaataacaacggccgccggcacaatcgccatgctgaccattttcggcagaaacagctctaaataacggcggaactggctgatgccttccatcgccagcgtcaccatccggcctgtcccctcttttttcgcaaagcgggggccgagacggaacaattgctcaagaaatcttttccttaagtctgcgccggtttgcgcggcatattggtacacgattttctgccggaccgttgtcaccgcatgccggaccaaaaacgcaagcaggaaaaagccgataaccggataaagagaagcaatccgcttcccgttaaataatccggttaccgcctggctcagccattccgcctgcaagatgatggcggccgtttgtataatcgttaatcccgtaatgatcgcaagaatccgcttcattcctttataaagaaacaggtcttttcccattaataagtcataggctccttatggctgacgcgtttccggaagacataatagctccagatctgactgccgataacaaacggcagcagagtcagtgcggcaattgtcatgaccttaagtgaataatcaccggaagacgcgttagctactgttaagtcatacgcgcttttcagcgagctgaccatgacgcgcgggaacagagagataaaaatcatcgcaactgtcaaagcaagacccgcgccggtcataccgaatgcccagccgtcttttttcttgctcatgaacacaacggcaagaacgttgcagatgacaatcagcacgaataccggaatcgtgatgtttgcccggcgtgtaaacatatccgtatcgtatgcagacatcgcaaagaaagcaagtacaacaagaaagataacaccgattacgcgttttgccatttttctcgcacgctcttgtaaatcaccgatcgtgcgcagggtgataaacattaaaccgtgcaggaatgaaagaagggtgacggccgctccgccaagaacggaatacacgttcacaatatctgaaaaacctgcgtgaatgttcatatgtccgtcaatcggcacaccgcggaacaagcttgtgaaaataagtccgaatacaaatggcgggataaggctgccgaagaaaatcacccagtcccatgttttgacccatttcagattattcacttggccgcggaattcaaatgccacgccgcgccccatcaaggcaagaagaatgatgataaacggaatgtaatatccgctcagcatcgtcgcataccagttcgggaatgccgcgaagatcgctcccgtacctgtgataagccacacctcattcgcatcccagaacgggccgatggtgttaaccagcactctgcgttctaattcattatggccaagaaatcgggtcgaaatgccgacaccgaagtcaaaaccctctaaaaagaaaaatccgacaaacaaaactgaaacgagtataaaccaaagatcatgaagtgaccccatggtagacctcctgactgaacggatccgttgatacaggaacatccttatgatcatcatggtccgcaccttttttaatttcacgaacgaataggaaaacaagcagcgcgcctaaaatcaagtacatgacgccgaagctgataattgaaaacagcagagatcccgtcgttacgttaggagaaacggattgtgcggtcgtcaattgtcccatgaccgtccacggctggcgtccgatttcagtcataatccaaccggcagagttcgcaatgaatggaaatgcgatcagcgcgatcatgccccgtaaataccacttgctcgtatgaagttttttgcggcggttcagaataaaaccggcaatcgcggcaaaaatcataagcgcgcccgctcccgccataatgcggaaactccagaacgtcgttttaacaggcgggatatagtcgccttttccgtacgttttttcgtattctttttgaagtgttttcatccctttcacactgccgctgaacttctggtaagccaagtagctcagtgcgtaaggaattgaaatttctgatgtgtttttttctttattcgtatcaatattcgcaaaagccgtccacgcggcaggatcaccgctgtcatcccaaagcgcttcactggcagccattttcatcggctgcgattccattaaatgctcagcctgcatatgtccgctgaacgcaacgccgataccggcgatcagaccgacaatcatcgaaagcttgaaagatttatggaagaaaggcacttcttttttcttcaataatttaaatgcgctgacaccggcgataaagaaagcacccgtcgcaagcgccccgaaaatgacgtgagggaattcaacccaaagctgagggtttgtcaaaagtgccccgaaatcattcatttccgcgcggccgtttttaatcgcaaagccgaccggctcctgcatgaatgagttcgccgtcaaaatccagaaagatgacataatcgttccgaaggacacaagccaaatgcaaagcaaatgcacttttttagataaacggtcccagccgaaaatccataatccgataaaaatagactccataaaaaacgccaaaagcgcttcaaccgcaagcggagctccaaatacgtctccgacaaaacgggaataatcagaccagttcaatccgaactggaattcctgaagaatccctgtgacgacgccgacagcgaagttaattaaaaagagatgcccccaaaatttagccattttgagataggtctcttgttttttgacaacataaagcgtctccatcaaagcaaccataaacacaagcccgatagacaaaggcacaaacaagaagtgaaacaatgttgtagatgcaaattgaatgcgggctaataccaactcactcatgatgtttttcctccaatctggtaaattgctcaacatttcacaaacacagcaaaatcattgctcggtatttcacaaaaaatgatatatttgctcaatgtttcacaaattcgtcaaaactattgaaatatcagcctgtacaccctgggggacagcggctgtcatagaaatgattcaatatcattactttacaacgattcagcctaaaaaaaaagatcaatatacctaaaataaggctgaaattgtgaccgattattgtcggatttgtagagattttatgtcagcacctaggatatttgtccctttgatatcgtacctcttttttattcgtgtggcgaacaaaatgcttttctcgatgaaaaagcccgccaaatcgccattttgagaaagaaaatgtgaagaaagcatgccctctagtaaattcataatatatgaacaatttaaattttttagtatactttaaatggggatattttttcactacataacgactgggggaacaagcatgggagaacttcaaccaaaattgcaaacggattcaatccaaaaacaggaacggactgataactggtttgccagagcaatgaatataagaatcggcattattcctcttcctatctatatcctgcttttcttgcttattacggtgtttgtcatgagccgtgatgtaaaaagcgacattctgacatcaattgccgtcatgagttttttcggatttaccttcggccagatcggaaaatccattccgatcgtgcgttccatcggcggccctgcgattctcgcaacctttattccatccgctgtcgtctactaccacttgcttccgaaagacattattacttcaacaacagaattcacagaaagctccaactttctctatctatttattgccggtatcgtcgtcggcagtattcttgggatgaaaagagagacgctcgtcaaagctttcgtcaagatttttattccgctgatcgccggctcgatcgcggccgccatcgtcggcttatgcgtcgggacgcttctcgggctcggctttcagcacacactgctttatattgtcgttccgattatggcggggggtgtcggtgaaggcgcgattcctttatccatcggctactccgacattatgccgatgtcccagggagacgcctttgcgcttgtgctgccgtccatcatgctcggcagcctgtgcgccattatgttatcgggtttgctgaatgtcatcgggaaacgcaaaccggaatggacgggcaacgggaaggttgataagtctgattattccgctcccgcattggaacagccggccaatgataaaacgtttgatttgtcctttttcgcttcgggcggtattttagcggtttccctctatttggtcggcatgctggcgcatgatttctttcagcttccggctcctgtcgtgatgctcgtccttgccgttctcattaagctgttcaggctggcgccggcttcgattgaaaacggagccttcggcgtctcgcgctttttctcgacagccgtgacctatccgctcttatttgcgatcggcgtttcaatgacaccgtgggacaagctgattgcggcgtttacgatcagcaacatcattaccattttatcaatcgtcgtcacgatgatggccgtcggttttctgaccggaaaatggctgaatctgtacccgattgagacggcgattattaatgcctgccattccggccagggcggcaccggcgacgtcgcgatcttgagcgccgctgaacggcttgagcttatgccgttcgcccaagtgtcgaccagaatcggcggagcgattaccgtgagcgtcacccttctgctgcttcatcaattctattaaactgaaaaaagcctccgcatgatgcggaggctctgttatttcatcacattttgaatataagagccgaatgccgcgccggacatgcccggcgacacacggacgcggtgaagcccgtaaagcccctgatctcttgacgccgctcccggctccgtcgtgaccgccatacggtagcctgacgcggcggcggcttttaatgtttccttattatatcgtccgacagggtagctgatcatagacgtccgctgcccgaacatttgatcaaataaacgcttagagtccttcatttcacgtcgctgctgctgcggtgtaagcccgttcaattcgagatggttcatcgtatggctctgaatggaaatgccgtgggcggccatctccttcatctgcttctcagtcagatgattcttgtgcccgataaagtttccgatcataaagattgtcgctttcatcttgtatttctttaaaatgggataggccgctttcacattgtcggtatagccgtcatcaaatgtgatcagaacacatttttcacgcggctccttatcctccgtcagcatcagataggcctcttcaggagtcatcgtataatagccgtgatcatgaagccacttcatatgctgccggaattcttccttcggcacacgcaggctgtttccctcagaaatgctgtggtacatcagaatcggcagtcttgccgttcctttcgttttaacccaggcggacgtatccggctcttttttgatttggcgctttacagactttttatcgtggtgcgcttctgccttcggaatgctttgttcggcgcttgcctcatggcccgagcaggcggcaagcgtaaacacggcagccaaaaggcacacgcacatgatcatgcgtttcatcgttttcctgctttctgtcttctatttactttttatatcggttatgcgtcataaattgttacatcaaaaaagccggacatccagctgtccggctttgcattatgagcggattcttatttctgtttcactgtcaaaaaagtgagctttattcatgtcgaaagcgacggtcaattcttcaccggcatgaatgtcatggcgggcgtcaatccgggcgataaaatcctgatccccgatccgggaataaaccataatttctgacccgagcaattccgcgacattgattttagctgtgatggatgaattcttataggattctaccacaatcagctcatcatgtatgtcttccgggcggatgccaaagataacatctttgccggcataccctttttcccggagcattttcattttcccttccggcacgctgagagcggctgaaccgatctgaatggcgccgtccgtcagcttccctttgaaaaagttcatcgccggggagccgatgaacccgccgacaaatacgttttccggatgttcatacacgtctttcggcgtgccgatctgctgaatttttccgtccttcatgacgacgatgcgtgtcgccatcgtcaatgcttctgtttggtcgtgcgtcacatagattgtggttgtttgcagcctttgatgcagcttaataatttctgcccgcatctgcacccgaagctttgcgtccagatttgacagcggctcatccattaaaaacactttggcgtccctgacaatcgcccggcctaatgcaacccgctgccgctgcccgccggagagcgccttcggtttacggtgcagatactctgtgagccccagcattttcgccgcttcttcgacccgtttttttatctccggtttcggcatcttcctcagcttcagaccgaaagcgatattatcatagaccgtcatgtgcggatataacgcataattttggaacaccatggcgatatccctgtctttaggagcgatgtcattcactctcgtgtcaccgatatagaaatcgcccttcgtaatgtcttccagcccggcaaccatccgcaatgttgtcgacttgccgcaccccgacggaccgacaaacacaataaactctttatctttaatatgaaggttaaaatcatcgacagccgcttctttttgatcgtaatacttataaatatgctccagccgaagttccgccatgtcatctcccccttttttgcaaacgctttcttaaataggattgtaacagcgtcaggcggcggcggatataggcaatgttcataaaaaaagtccgctgccttcgtgcacatttcccatttaatgtgatttttcatactgcagacaaatgaaataagccagcagggcgccctgatatgtcttaatatcaatacccgagcgttccgcaaatttatcaatccgatattgaagactgttgcggtgcaaatgcagtcttttcgatgtgagcgacatgttcgagttatgttcaataaaagtctgaatcgtatgcttcagctccggttctttctgaaacagcagcaccgcttcttcgtgaagcaaggctgagagcttttctctgctttcttccgtgagcatggccggaaataccgtttccgcggtcagcgtgctcagctgcgggagatgacgccggccaatctgacaatattgctgttctctccgataatgaaggcgcagacgttctcccgcgccgtaataccttccgatgaaaaaacggacactgaaataaaaatcgccttcgagaatcttcacaaaagatgcgatgtcatccgaatctggcgcttccagcttttcttcctccacaatcacgccctgatcccttcccgtccggacaactgtatatgaaaccggccagaaatggcgcagcgcttccgtaaatgccccccagtcccgttctcccaataagtcataatggataaaacggacacgcggctccttgacatcaggcaccggaccttcttccagcagaaaacgccgccacctctttgctgccgccgtctccggaaaaaaaacgcctttttcttcagcgggcgccaaaaatgattccagaagcagtttctccttcggggtaatatcctccttcggaatggcgacatagacccgccttttctcatcataaaagcaaaagacatcctccgccgtacagcacgtatcagacaacacagccctcgggtaaattgccaataacgggttcatatgcgctcctttctatcgctctatcatattttcagtataaaacgtccggccgattgtatccacttcgttttaagaaacagctttcaggctatttcccgggaaacggatataaccgcttctgccggcataagaaaaaaaccctccgcgcaggcagagggatcctttttatttagagatatcgacgaagccttcaccaaagacgtcacgcacatcatgaacaatgacaaacgcttttgtatcacagcttttaataatttttttgagcatggaaagctcttgtttctggatgacgatatataaaatttccttcgactgccccgtgtaatttcctttacccgacagcagcgtgacccctctgtccataagcgtgttgacctgttcagcgatttcgtgcttatgctcagatataatcgtcactgcttttttcgtattcaggccttcaatgataaagtccatcaccttcgttccgatgtacagcataacaatggtaaacatcattttttctgcaccgatgatgaaataagaactgaagacgacaatcagatcaaagaacaaaagcgcatagctgatattccaatcgagatatttgttcgcaatcctcgccaaaatggcagaacccgcagtcgtgcctccgactcgaataatgatcccgattccgacaccggcaaacacacccgcaaaaatagtattaataatgagttcatgtgaaggcgagtgccaatcatgcgtcagatgcagaaacagtgagtttgcgacaacggtaatgatcgtataaagcgttgtttttccgtctaaaaatttgtatccgataatcaataagatcccgttcaaaatgatattcgtcaccccgggcgaccattcaaacacatagtacaaaatcagggtgattcccgttaccccgccctctccaagatcattcggaatggcgaataaattaacggccaaagcaaagataaaagccccaataatcagcatcagcacatccagcaatctctttttcatcccagacactccctttatataaaatcaaaaaagcccgggagagcactcttcattaaaagagcagaaactcccgggcttttatcccaacgtgtcacagcaggaacctgctgtgtgttttctctcggtccagaccaattcagcattgcggaaccctagaaaaccactgttttttatgttcagtttttgtatatctttcaagattatacgggaaatcaagaacatgttcaaccactcttttttcaataaacgtataaaaaatatgaacgatctgccgatactaaaaaaggcactaaaatacatgactaaaaaatcattaaaatactttttttctcaaaatattattgactataggttattttacaggcattatagtatgtagttttcaagaaatagtttacataggaggaaatattatggcgggcaacctggtgtcttgtaaggcatgcggcaaagaaatcgctaaaggcgttaaaaaatgcccaaactgcggtaaagatcagagaaacttttttatgagacataaaattatcacattgcttctggcagtagtggttattatcattctcgtaaacatcggcggcggaggcggatcttcatcatctaaaaccgcgtcttcaaaagctgcggaatctaaggaaaaactgtataacatcggtgacactgttaagactgaaaaaacagaagttactgttacgaaagtggaaaaaagagattcagtaggctctcaatttgtcgagaaaaaagcgtctgacggcggcgttatcgtagctgttcaatacacagttaaaaatgtttcaaacaagccgttaagctctttctccattccaagagcgaaattagtagattctaaaggaacatcctatgattcagatattgatgcttcttcaagctatgcaacagaaacaaaagtagacaacagtaaaattttaagtgacttgaacccgaacattaaagttactgacgtaaaagcttttgaagttgataaaaacgcatactctaaaggcacttggaaattaaagttcagcaacgatgttgaagtgaaaattaaataatgaccgtaataaaagagaccttcaccatttgaaggtctctttctttttacaccttttggtacccgttcacattggaggactgccacttccaagagtcggcgcacatttcttcaagcccgcgctttgcttcccatcctaattcagtcttcgcttttgccgggtctgcgaagcatgcggcgatgtctcccgggcgccgggcggcaaaacggtacggcacttcttttcccgatactttttcaaacgccttgaccatctcaagaacgctgtagcctcttcccgtgccgagattataggcatccgcgcctgttgtgttcagcaccttctcaagcgctctgacgtggccctcggcaaggtcaacgacatggatgtaatcccgcacgccggtgccgtcctttgtcggataatcattgccgaacacctgcaattgctcaagcttgccgacagcgacttgggcgacgtacggcattaaattattcgggatgccgttcgggtcttctccgatccgcccgctcgggtgcgcgccgaacggattaaagtagcggagcagcgcaatgctccattcagagtccgctttatgcagatcgcgtaaaatctgttccagcatcagctttgtctgcccgtaaggattggtcgcgcttaatggaaaatcctcagtgatcggcgttgtttccggaacgccgtaaaccgtcgctgaagaactgaagacgatttttttcacaccgtgtgcctgcatggcttcacataaaataaacgtccccgtcagattattatgataataacggagcggaacagccacagactcaccgacggcttttaatcccgcaaaatgaatgacggcttcaatctcattttcagcaaacacccggtgaacggcatcacggtcaaggagatccgctttataaaacacaagctcttttccggtaatgtctttcacacgctccaatgcttccggtgaactatttgacagattatccagaaccacgatgtcatagccgccgtttaacagctcgacacatgtgtggcttccgatataacccgctccgcctgtcactaaaatcgccatgaagaaagcctcccctattgaatgaattgaccatattatatcggttttttcttcctcaatcatccatttccaaaaagtttaatcgtttagtcatcgtttcttcataatttattttcattcgcgtaatacacagagccctcgattcaaaccggttgcgaaatagaaatccctcccccgcgcatggtaagataagacaaaggagatgacggtatgaaaaatgaaatcattgaacgctttacctcttatgtaaaagtcgatacacagtctgacgaaaacaatgaaaactgcccttcaacccccggccagctgacattggccaacatgctggcagatgaattaaagtcgatcggcatgacagaaatcacagtcgatgacaatgggtacgtcatggcgactctgccggcaaatacggataaagacgtgccgactgtcggttttctggctcacgtggacaccgcgaccgattttaccggaaaaaatgtgaatcctcagattattgaaagctacgacggacatgatatcgttttaaatgacaaactcaatgtcgtcctgtcgcctgagcaattcccggagctctcccgctataaaggccagacgctgatcacaacagacggcacgacgctgctcggagccgacaacaaagcgggcattgccgaaatcatgacggcaatggcgtacttgatcaaacatccggacatcaaacacggaacgatccgggtcgcgttcacgcccgatgaagaaatcggcagaggccctcacaaattcgatgtcgcccgcttcaacgcggcattcgcctacacgatagacggaggccccctcggcgaactgcaatatgaaagctttaacgcagccgccgcaaagcttacttgttacggaaaaagcgtccacccgggaacggcgaaaaacaaaatggtcaacgcttcaaaaatcgcgatggaatttcatcacgcgctgccgaaagaagaagcgccggaatatacggaagggtatgaaggcttctatcatttactttccatgaacggagacgtttctgaagccgccctgtcgtacatcatcagagactttgacagagaccgctttgcagaacgaaaagaatatatgcagaaaaccgccgatgcgctggcggccaaatacggcaaggaaagcatcaagcttgaactgcgtgatcaatattacaacatgagagaaaaaatcgaaccggtcaaagagatagtcgatgtcgcatatcaagccatgaaaaacctcgacatcgaaccgattatcgaaccgatccggggcggaaccgacggatcacagctctcttacatggggctgccgacaccgaacattttcacgggcggccaaaacttccacggaaaatatgaatacatttccgtcgatcatatggaaaaggcggtaaacgtcattgttgaaatcgccaggctctttgaagagcgcgcttaaaaccaaagccccctgctttggtttttttctttcacatgaaacctttccttctttctttccgtatataaggtatgaaatggaaagaaggagtgaagactatggcaagagggactgtagcgaaagaattgaaaaataccttaaaagacccgcgtgttctggagacgaaatcaaacccttttaaaaagctgcggaaaatgttcaaacgatttttttaagataacatctcgttttctttaaaaaaataaagaaagcgctgtcatcctgcagtcatctgttagaagcagttattttgcatatgataagattttttagggtactgaataacacagggcaaacgaaaacaacgaagtagttaatttgatgcttacaaaaaatagtgaaaaagttatataaacgattatcattcatcagccgatacaatctatagaaccacaacaagagcaaaatctcttcaacccatagtcatttttacggaaaatgacgttattttttaaaaaagtgacaattgtttgaatacttttcgtttgttttttcgtacaataataataccaaaactttttttgggaggtatgtaaaatgatgctacttatttttgctgctttgacagggtatcttgttttctctttcagtaaggacaaccgccggaaaacgccaaagacaagcccgctggtgacagctgccgacacgaataacatcattgatttaaatgcgatccgtcaaaaacgccggatgccgctatcataaaaaacgacagctgccgcaaaatcggcagcctttttttatgcacccggccgatatgaaaccatccgcctccttttttcgtacaacattaaaaaggagtttttttatgtaccatttttacatcaaagagcgaatgtttacgtttaaaaatcgttttcaagtgtttcttgaaagcggaaaagaagtctacaatgttgaaggaaagctgttttcattcggtgatgaactgaagctgactgatttggacggccgcacgctcgccagcgtcaatcagaaactgatgtcgctcgttccccgttacgagatttccgtcagcggcaaacccatctgtcaagtcatcaagaaagtcacgcttttcaaaccgaaatttgaaatttccggactcggctgggatcttaccggcgatgtgtggggccggaattttcaagtgacagacggaaaatcaaaccggatgactgtcaccaaatcatggatgagctggggcgattcctatcatttgcagattgaaaaggaagaggatatcgttctttgtctcgcgatcgccattgtgatagatatgattctatttgagggtgacaaataaaaatatttatcgaaatatattgacaatatgagaaaacatactaagattaatagtaatacagtttattctgaaaaatagcatatttccttatcaagagaggtggagggactggccctatgatacccggcaaccgctgttcagcagaatggtgctaaatcctgaagataaggttgagatttgcggacgcaagctcttccctatccgagggaagagtttttttatatttcatcaggaaagaaggaatcgttcatgtcacagcaaaacacagaacaaccattgcatacgcttctaagaaaaaacccgccgtttcgcgcggatcaggtcggaagtctgctgcggccggcggctgtgaagcaagcccgcctgcaaagagcggcgggtgagatttcggcagaacagctgcgcgaaatcgaaaacaaagaaatcatccgcagtgtgaaaaagcagaaagaaaccggcctcaatgtcgtgactgacggcgaattccgccgtgcctggtggcattttgattttctcgaaaatttagacggcgtcgaagcgtttacgcctgaaagcggcattcagtttcacaacgtacagacgaaagcgcgcggcattaaagtaacgggagacattgatttttctcagcatccgatgctcgaagattataaattcctgcacagcattgccggcgatgctgttccgaagatgaccatcccaagtccgaatatgctgtttttccgcggaaaattggaaaaagcgtcctaccagaatgattacaaacaatttcagcacgatgtgtcaaaagcgtataaaaaagcgattcaagctttctatgacgccgggtgccgctaccttcagctcgatgacaccgcatgggccgttttcttatcagaagcggggcttcgtcagattgaagctttcggcacgacgccggatgagctgcgcaagctgtttgccgcttccattaatgacgccatcaaggatcgccctgacgatcttaaggttacgatgcatatctgccgcggcaacttccaatccacatggacggctgaaggcggctatgatgcagcggctgaaacgatttttgacgggcttgatcttgacggattgttcctggaatatgatgattcccgctcaggcggcttcgaaccgctccgttatgtcaaacgctctgatcttcagcttgtgcttggtttgattacgtcgaaacacggcgaacttgaagacaaggacgcgattaaacgccggattgaagaagcttcacaatatgtcagcctggaccagctttgcctcagcccgcaatgcggattcgcctccactgaggaaggaaacctgatcacagaagaacagcaatgggcgaaactgcgccatgtcgtcaacattgccggtgaagtctggaaataaaaaaaagacacgcgattagcgtgtcttttccgttttacagcggaccggttccgattaaaatatcgatatctatcgtgacagcagcctctttccggctgataaaccgccggatgctgtcatcagtacatttccatgttaagggcgtcattttcacaagccgctcgaggtcaggctgcgctaaagtctttgtgtaacacagccgtttgcgctcaaaggtttgaaagcccgcttggaatcgtccggccgcagaatcggcggtgtcattccgccgagagctgtctccgaagaagaattcccttacttccttcagataatcacgccgcggcaccgctttaatgactgtgccgccctttcgtaaaagcctgctgcattccttgtaattccaaggtgataaaacagacatcacgacatcaaaacagctgtcggcaaacggcgcatccgccacatcagcgacggcaaaaaccaaatgattcccgaaggcctttgcggcatgcagcacaccttctttcgagagatcaatcccgattcccgtcacggaaaaagcgggctgaagcaatttgcacacggcggctaaatgagagccttctccgcatcccgcatccaatatcgccgctgatgtttgcggagattgaatatgggtgatgatggcggcaatctccttttgaaccggcgcaaaaaattcccggctgtcaaaaagctcgcgtctcgcttcgaacagctgcctgtcatagcgggttttgaccgatttattgaggaaattcacatatccttgttttgatatatcaaatgtatgcccctgtccgcacatcaagcttcggtattgtgagaccgccatggccgaactgcatagcggacacctgaacacggactggcatgattgcagtaattccgcgcgttttctttttatagacgtcaaaaaaacacctcattcattcgttattccgatgaaatgaaaaaggcatagacaaataaacctcacttaattggaagtttcaacctatttatctatacctctcattatctgtaacgaatgaactgaatgatcacgaaaatgcccccttttctgccgtcttttgaaggctgtgccctcagatccattttatcagctgcatcccgtctttacaatgaatcggaacggttttcaggggttttttattcctttattatccaattacttatgcacatcctttattttctttatttataatataaatttattattttgaaaatatctaaaaaggttgattttcaaaaattgaaacgataaaatactgctatctcatgtaatatcgttattcttgtatatgatcagtaatatggtctgattgtttctacctagtgccgtaaaagactagactacaagaaagtttgcataaatttgaacgagtgaaaagcatatgacgctgtctattcttttcttttggctcttatttatcacactttctggctttcaggaatttgtgacgaataagagttttttttatttccataatacccttataggagttgctcacatgtactttttattgaacattgtcggtctcattgttgtcatggctgttgttttcttatgctctcccaacaagaagaagattaaatggcgtccgattgtcatgctcctcgtctttgagtttctgattacttggtttatgttagggacaaaagtcggcggctttgtcatcgggaagatcggcgcgttctttacatggctgatttcctgcgccagtcaagggatcgcgttcgcttttccgtctgtcatggccaatccgacggttgattttttcttcagcgcattgctgccgattatcttcgtcgtgaccttctttgatatgctgtcgtatttcggtattctgccgtggctcattgataaaatcggctggctgatttctaaaatatcccgtctgccgaagctggagagctttttctccatccagatgatgtttttaggaaatacggaagctttagccgtcatccgccagcagcttgccgccgtcagcaacaatcggcttttgacattcgggctgatgagcatgagcagcatcagcggctcgatcatcggatcatacttgacgatggttccgtccacttatgtgtttacagccatcccgctgaattgcttaaacgcgcttttaatcgccaatatgctgaatcccgtggacgtttctaaagaggatgatattatttacgttccttcaaaagcggagaaaaaagacttcttctccacgatttctaacagtatgcttgtcggcatgaacatggtcattgtcattttagcgatggtaatcggctatgtggcgttaacggccgcgttaaacggcgtactcgggctgttcatgcacgggttgaccattcaaaagattttctcatacatcttcagtccgtttgccttccttctcgggttaggtgtacatgacgcgatgtatgtcgcacagctgatgggcatcaagctcgcgacgaatgaatttgtggcaatggccgatctgaaagggcagctgaattcacttccgccgcacacgattgccgtggctacgacattcctgacatcattcgcaaacttcagcaccatcggtatgatctacggatcttatcaatctctgcttgatggtgagaaatcagccatcatcggaaaaaacgtctggaagctgcttgtcagcggaattgccgtttccttattgagcgcggcgattgtcggattgtttgtctggtaaaagaaaaaaagcgataccgctccgttttggagtgatatcgcttttttttattgatagacggatgcaggtacgaaaacgtcccggattcctgccgcgtacggcccgagatcatattgtccgaacacaacggcaatgccgtttttcgtaaagaagaaaggtctttcgttattcaggatgatctcttgttttttgacgtcctgatcgaacagatcgtcatgtttcttgatgtagccgtaaagatagtctctcgttttgttagctttcgtttttgtattcagcacattatcgagtgtgacccgtttttttgcggccaagtcgtaattaaaagtctgaacggatgtcagcccgtgtgcgccgcctgtgtaactgtagtcttccgtctgaatgctgagcttgccgtcttgattatacttcaccttgaaatctgtttggtattccgctttgtagccttgttttttaccgtcttttttgtttttcacatattcttggtacgattgttcaatatagcgcttgaagtcctgattgattttcttttcaaaagatgcgtttcctgtatttgtgacctcagggtatgtcagctgctttacatgcttatacgtatggcttttgacaacgggctttgcggtttgcgcggcctcggctgaaggcgcgaaacccccgaacggcgcggctgtcagcacggttaagagcacggccgccatcattttgaatgcctttttcatcacaactcctccttttcattaccgttccctttttgaaaacgggttacactctatagacagcgcagatcagtaaattgtttctgggccttctttcacattttctccataaaaaaaagagacatggaaaatccacgcctcttttaccgtgaaggtctttgcgcaatggcttcataaacggcttccgccaaatcggagttgccgaacatctccaaaacaccgataacggtttgatcaggaatcggttctgattcctccttcggcacgacaagctcttcagccgtttttcgcagctcttcgtttaaaggctgtccgggataagccttgctgtaaatggccatcggatcaaggtcatgattgacgcaccattgggcaaacaccaaaatcatcatgttttcgtcacgccggtaatattcttcgagttgtttttgattcatatgtttagctccgctattatctttttttattactttatcatatttatattaagacttcattctttttagtttttaaggtgttggatatgccgaagtaccccataatagactcaactaatgagttattactaggcggagtgatcttaattttctcattatagagttttgcaacttttgtttttatttttttgtccgctaaaaattgaatcaatttttccttgttacttccagattcgtaatttgtcggaatgagtaatgaagctgttccatcaattcttgaaaatttaatgtctgaattaaaactatataatgcaaataacttttgtatatcttcatttgcatttaaatttataatttctttaatagtttcatagaaaatcttggggtctaaacaatcttcgataactgtttgttcataatactgaccttgtttccatggttctaaaagtctaactgattcgatattattactttttaatgtttgtaatcttctcaaatccacttttccataactttcagttgcttttgaaacattggtctttactcgatcagtatcaatcatacaaagaattttaccactcattgcttgtgctgtagttttatcggataaaggataactcaataaaccatataatttaatcacattagaacatccaccaacaggtagaattttaaagtttcccgcatcttttaataattcttcgaggtataatttatctgtacttccttcgcatataatccaattagtatttttcatagatttggagtaactaataatgctagttgctaaatcaaacatactttttaatgctatatcatcaggaaatcttcttctttcatctaaataatcaaaaaaactaaaatctgaaatcgaaacacttccttcgatttctttactcacatgaagtaaatgaccgctatttgtgatggggagagatccataccaatgggtcgttatcatgacttgtctattaaagtctttcgaaagtctttctaacctctcgaactgcggaaaacaattaacaacattcatggacacttctggttcatcaatagccagaattaattctctatccatttctttcacatttgaaagaaatgcatatgcaatgtctattaatgcctttctctgctcaccagaacttagtttttgaacttctctatttttgtacctcaatggtctttttgaaaagtaagcttcaataactttttctcttatatctgttactgttaaatttctcttactatttgcttctgggctgtaattatattgattatcaattgcttttatagaattatttatgtcctccataaatttattaagataatcatttataaagtttaagaaacttttatttttcccttctatttcatacctacttgtcagtaccttatcaatttctaataggatatctttgttcattaaagtttgcatttgtttatcttcaatttttaaaatttcgttagcactttgttccacaggaatataaacataagcatagtattcttttattaatttccttatcctttctattttttttatgtattctttattccctaaaattttttcaaagtagctctcgaaaggagcaagtgttggcttcccattaaatttcacacccgagggaagtatatagtattcttgttcagaatagttagttgttaagtagtcaataaactcgtaaaaattttcaatgtattcccttctagcagctccttttaaccagtcttgtataccgctccagaatttgtcgcttataatatttatatcctctaaagttcttttatttccatctatctcagacctactgtatcgatttgaattaataataaaattttcaaatttacccctttcaataaaaaatacaggggttatataccgatcctctctcctagatcctcttgtcgcattccaatctcgtccattaaagaaaacatcaagagattccaagattccacttttgcctacaccatttgctccaatatagacagcatacttttgctcattgttatttgctataggtgcaaaaattgattttgcatatgacttatatccgttaataaaagttcccacaatcataatacttatcccacctaaatttttattatattccagaatatcacacataaaacaaatattccattctgataaactaaaaaaaagcacccttaacagggtacttttgactattcttatatgtttctgccccaatgccgatgctcagccacggctttcagaaattgttcgcagtttccgtccggaacaaggccggggccgttttcggttccggcggcgagggcgagaagttcttttccttcaccggaggcgccgatcgctttgtaatggctgaaggcttcgttaacgaagtctctggccgatttttgggctttgaggctgtctgtgctttgttttccgcccggaatgaaaacagcgtcgtacaggacggaatccgctgtcaggaaagtggctgacgcttcgagctccttgccgttttctcccttcacggtcccaagcgcggggctgatgatatcggctctgactcccgcctgtttgcatgcatcaagcacttgtttgactttctcatcagaaaacccgtggtcggttaaaaccgcaacctgccttgtcgctgccgtcttcaccgtgttttcctggcttaaggccggggaagtgaacgtttcatcagattcacggtccttcggcggcgggttcacgccgattcctttcgcaacacgctcggcaagcccggcgtcgacgtgactgaagacatccaccacctgctgctgcacatccttgctgttcacttttccgacttcaaaacagaacgcggagatgatatgttctttctcggcgggagacatgctgttccagaacatcttcgcctgagaaaaatagtcattgaagctctcgctgcgctggcggatttttctgccttctactttttcctggtaatgaacgtatccgccttcttcttctgaagccggcgacggatcattgttctgcagggaatttttatgataggcgacggggcccttattaatcgtcatccggtggtagccgtcgtattggttgttatggaacgggcagaccggccggttgatcggaatctcgtgaaaattcggcccgccaagacggatgagctgtgtatccgtataagagaaaagccgtccctgcagaagcggatcattggtgaaatcaatgcccggcacgacatttcccgggtgaaaggcgacctgttccgtttccgcaaagacattgtcctgattgcggtcaagggtcatttttccgatcagcttgacgggaaccaactcctccggccacagcttcgtcggatcaaggatatcgaaatcaaacttaaattcatcttcttcgtcaatcatctgaacaccgagctcatactcgactttgccgccgttttcaatcgtttcccacaggtcgcggcggttgaaatcgggatctttcccggcaattttctgcgcttcatcccatacgagggaatgaacgccgagcacgggcttccagtggaattttacaaagcgcgcttttcctttctcgttgatgaaacggaacgtatgcacgccgaagccctccatcatccgatagcttcgcgggatgccgcggtcagacatcgtccacatgaccatgtgagccgactcagggttattagcgacaaaatcccagaacgtatcatgagccgtcgcagcctgcggcatttcattgtgcggttccggttttatggcgtgaacgagatccgggaatttgatcgcgtcctgaatgaagaacaccggaatattgtttccgacgaggtcatagttcccttcttcagtataaaacttcgtcgcaaatcccctggcgtcacggacggtgtcggctgaccccttggaacccgccactgttgagaaacggacgaaaacaggcgttttgacggacgggtcctgcaaaaatttcgcccgtgtatattccgtcatcggttcgtacacctgaaaatgcccatgaacgccgtacccgcgcgcatgaacgacccgttccggaatccgctcgtggtcaaagtgcgtcattttttcacgaaaatgaaaatcctccatcagcgtggggccgcggacgcccgcttttaaagaatgttcatcctcagacacgcgaagcccctgattggtcgtcatttttttgccgctgttatcagaccggtactgctccagctgttcgtcctttgagtgttcatttactcgtttgttttgatcatcactcatgtcagttcccccttttaaaacgaaacattctacagcacatttacccgcggcgttcttcatataaactgctgatccgctcattaggattttaggtctgtatttacatatgcggtcatacacattttgaaataagccattttcacagaaagaagttgtgaaagcgcttaccaaaatagctgttgaacaggggaggtcatatcgtgcttgccatactcggttttgtgatgatgattgtctttatgtatcttattatgtctaatcggctttccgctcttattgctttgattgtcgttcctgttgtgtttgccctgatcagcggatttggcaaagatctcggcgagatgatgattcaaggcgttacagacctcgctcctaccgggatcatgctgttattcgccatcctgtatttcggcattatgattgactcaggtctgtttgatcccctcattgccaaaattctatcgcttgtcaaaggggatccgttaaaaatcgccatcggcacagcggttctgacaatgaccatttcgctggacggagatgggacaacaacgtatatgattacgattgcggcaatgctgcccctttacaaacggctcggcatgaaccgtttggtgctggcggggatcgcgatgctcggttcgggcgtcatgaatattattccgtggggcgggccgacggcgagggttttggcttccttgaaattggacacgtcggaagtctttacgccgctgattcccgctatgattgccggcgttctctgggtgatcgccgttgcttatctcctcggaaaaaaagaacggaagcggctcggtgtcatttcaattgaacacgcaccgtcctctgatccggatgcagcgccgctgaagcgccccgctctccaatggtttaacctgctgctcactgtcgccctgatggccgcgctgatcaccagcctgcttcccatccctgttctttttatgatcgcgttcgccatcgccttgatgatcaactatccaaatgtcaaagagcagcagaaacggatttcagcgcatgcgggtaatgcgttaaacgttgtctcaatggtgtttgcggcaggcatattcacaggcattctctccggcacaaaaatggtggatgcgatggcgcattctctcgtttccctcatccctgatgccatgggcccgcacctgccgttgatcactgcgattgccagcatgcctttcacctttttcatgtcaaatgacgccttttacttcggtgtgcttcccatcatcgccgaagccgcttccgcttacggaatagacgccgctgaaatcggaagagcctccttgctgggccagccggtgcatctgctcagcccgcttgtgccatccacctatctattggtcggaatggcgggcgtcagctttggcgatcatcaaaaattcaccatcaaatgggccgtggggacaacgattgtgatgacgattgcggcgcttttgattgggattatttcgttttaattaaaaaaggatttccgccagcggaaatccttttctgtacattatttttttgtatagcgcacccagtcataatgagcgtatagcggatttacaccattgtaggaaccgagccagtcatcgacacctatcccattccacaagttcatcatgatctttcccgggtttgtcgggatttggcttgtcgcagtatgttttaattgcccatcgacataccatttaatagagtttggctgccaatcgaacgcatacgtatgataggcattggccgcgtcaaatccgagatccgcaaccttctcatggtttcccgcgccatttgtataatagttaaattgaacctttgtcgtgtcttttcctaaaaattcgatatcaatctcatcccaaggagttccatccgttggacctgtataagtgaagaacgatgaaacgatccccgtgtttttagccggtttcattctgacttcataaagtccatagccataggtttgaacggagcggttctccccgcagtcaaacttgttataagacgggcttgtcagcgccaaacgcatttcacctgatgacgtcattgatacattatttgcacgccacgtgcagttgaacatatctccattggaataaccatttgctttttgccataagccggagttatagctgttaaaaggttcaaaaaacgatccgcctgtttgagctgatgcagtagaagtgatcgcacacaaactcaaaaacaatccagtgacaagaagcagcagcactcgtttcatacgataaaacatgtcggcattcccctttctttgaaaacgatttctttatcgatcatacatgattctgttaaaaggggacatcggtcagaataatgataataatgaatcttaaaaaaacctaaattaccatcagcacaaacagaaatgatcagcgctcattgtaatttaggttttgcctgcttatcagtaacaatcctaacaagatcatatgtgaatgaagaaaaaaatgccaacgctttcattatgcttatttgactaccctttctatgtgaatcgttaaatacagcagctcgtcactggtgagcttgtgttcatacgtcctctcaatgcatgtttggattttcttcgtgcattcatacgcccgatggtacttttctttcactgtctccagcaaaaaatcgtcctggctttccatatgtgtgccgttaaatagacgctgcgcgaaaaactttaagtgggtgacaaaccgataatagtgaagtgattcctcgttaaagtcaatcttaaaatggtattttacgatactcaaaatctcttgcatgacttttgtaatgttgatgatattgggcatctcttcattcagctcggcattgacaatatgcagcgcaataaagcctgcttcatcctccggcagagacacgccagtcttgttttttaccatggccaacgcttgtttgccgattgcaaactcgtctttatacagccgtttcgtttcccacaataaggcgtttttgatatccagccctttcttattgcgctggatcgcaaagttaatatggtcggtcagcgacacatagatgctgtcattgagctttttgccgagctgtaatttcgcatagctgataatctcttcggatacttccatacattcgatcgggatatcatacaaaagggttttgaacttttcggatacatctttgttatcgagcgtgaacactttctcaatgcgggcttcatctaccgggtctcccgttttcttttgaaaagcaatgccccggcccatgataaccaattcctgattgccttctttgagcacactgacaacattattattaatgactttcgcaatcttcaattctgtctccctcccgcctgaccatttacctgctacaccttgattttacatcctttttgaactaggtcaatatctccaggtcaatcagaaaacgccgttcagaaatcattgtccaacgatgaggcagcggcgcatataatgcagagaaccggtttttgggaaggagcgtgtgtgatgaaacggttttcgaaagaagaacgcagctggatgctgtatgattgggccaattcagcttattcggtcattattatgacggcggtattccccttgttttttaaagccgcggcggcggaaaacggtgtcagcgcagctgattccaccgcttatttgggctatacgattgccgccgcgacttttattttggcgatgctcggccccgtcttaggaacgattgccgactacaaaggatgcaagaaacggttttttgccttcttttttctgatcggtgtggcgggcacagccgcgctggctttgattcccggtgaatcttggatgctgttattaatttgttatacaatttccacgatcggctttgccgggtctaatgtgttttatgatgcgtttctcgttgatgtggccgcaaaggagcggatgaatatggtgtccgccagggggtttgggctgggctatatcggcagtacgatcccttttctcctcagcattgccgtgattctttcagctcaagcggaggtgattccgctgtccgcccaggccgccggccgcattgcctttttgattacggcggcatggtgggggctgttttcgatcccgctccttctccgcgtccgccagcgctattatatcgagagggagccgcggcttgtaatcagcagttttaaacggctggccggcacgctgaagcagatcaggaagcaccgggcgctgtttttgtttctgctcgcctatttcttctatatcgacggggtcggcaccatcattacgatgtccacgtcatacggggctgacctcggcatcagcgcggcaaatctgctgattgttttatttgtcactcaggtcgtcgccgcgcctttttcgattttgtacggacggctggccgaacggtttaaaggaaaaacgatgctttatgccggaatcggcgtgtatatgattgtctgcacgtatgcttattttatggattccgcttttgatttctgggttttggctatgcttgtcgccacttcccaaggcggtattcaggcgctgagccgctcttactttgcaaagcttgtccccaaacagaacgccaatgagtttttcggcttttataatatcttcggcaagttcgcttcgattatcggccctcttttgattgccgtcaccgcccagctgaccgggaattcgtcagccgccgtgttcagcctgatcattttgtttgtaatcgggattggcatccttgcgtttgtccccgaggagacggcgtaaaaaaagcctgcgcgcggcaggcttttttttatttcttggctttatggactttcagttttttgcctttgaccgtcgtatttttcatgatgtcaagaacgtgcgggcctttgccgttcagaatttcgacgtacgatgcgttgtccagaatcgtgataatcccgatatcatcggctgaaacgccgtcgattttcgcaatcgttccgacaaaatcgaccgctctgagttttttctttttcccgccgttaaagtacagcttcatgatgtctttgtttaactgttcgcttttgtctgttttgacatcggggcgggcgttcagtttttccgcaaaagccgctttccgttccgctgtttctttctcggacggggcctcccgcttttggatgcggaaaccgatatatgtctcaatgtcattcaggaaccgcgattcagaaggcgtcacaaacgtaacggccagtccgcggtgtccggcgcgccccgttcggccggtgcggtgcacatagctttctttttcaagcgggatatcataattgatgacgaggctgatgttttcaatatcaattcctctggcggcaacatcggtcgcaatgagatagcggaactcgccgcgcttgaactcgttcataacgtcaaagcggtcttcctgcaccatgccgccgtgaattttatcgcaagggtagcccagcctgtccagctcatcggttaactggatgaccctttcttttgtccggcagaatatgatgcagctgtccgggttttcggtgatcaggacatcacgcagcaaagatgttttgtcctcttcttctgttctggtgacaaaatgctcaatgtcttttgtcgtcaggccttccgcttttacttcaatcaattcagggtccttcatatatgtgcggctcagcttctcgacgtcatccggcagcgtcgctgaaaacagcatggtgactctgtttttcggcagatactgaatgatggcttccacctgttcaataaatcccatattcagcatttcatccgcttcgtcaatcaccacatacgccagccgttcgagcggcagcgtccctttttctatatgatcaagcacacgccccggcgttccggcaacgacgtggcttttttgcttcaattcggttttctgtttgtcaaaagaagcttttccgaaaaccgccgtggcttttatccgtttgaaacggccgatattcgtgatatcttctttaatctgcgccgcaagctcgcgggtcggcgttaaaatcagcgcctgcggtttgttttcctcccattccgcaagctcgcagatcggaatgccgaaagctgcggttttgccgctgcccgtctgcgatttgacgacgaggtcttttttttgcagcgcggcggggatgacgcgccgctgcacttcagtcggctcggtgtattgcaagccattcagcgcccgtcggatctcggggctgatcgcatattcattaaactcattcatgactaaactccttctctgtccggctcccctcattatacgcgaaatgccgccgctttaccctgacgttttgccgggccattcgggggactgctttttcttcatgtcaagcacgacccatttggcgcaataaaagctcatgcttccttccccgtcatcgacatagtagcggatcgattcccagccgccgtcgaccgggctgatatccagatggatgtcggtgatgctttcaagatcatccagccgggcagacctcacatcctcaaaccgcagcacggcatcatactgcccatcagtcagcttcagctcaaacaccgggattttatcataatactcgttatacccggtatagaacgtaaactccgtcaattcaaaacaacccggcgaatccggccccagcagaactgctttctcatgtttgtgccattccattttgtgcctccttacttaacaccttcttctctgctgtttcatattgacggcaataaaagcggaacgtttggttctcccactcctccacgagaaaatgctgtccctcatctccgtcagcagcaggatcaattgttacaatgcctgaaccagcagcatgactctccatttcttttatttgaacggaagaaacgtctttgcatatgagcctcaaacaaatgagctgatgttcatactcgaaggaaaacaccaactcaattgcagaaatctctcgttcccggaaaaggcggaattctaaaagctcttgaatcagccacttattctttttcattttctataaattctcctatagaagcggcatacaactcaacatcggcagtctcatgatcccacaaataaacagtctcctccattacaccgtccttctttttcaagcacagcttatctccggttccgttgtcagcaattacgatcatatcgtcgggcatgctctcttctctgcacacactgttttgcctgatcacatcatcccaagttttctgtaagcggctttgttcacggataggaaaaaaaatccattctccgatttccgcagggttctttttatgaagcagccgtttatacgctttcggaaaagacgctctcaagctttgttccgcagctccgaactcttcttctgtcatcctgttattcctcctcccgtaaaagcatgagattcattcacaagcggtcttcacttttgaaataagacaggagcgtttctttctatcgcccttattagcggtgagccaaatatcgtaatggtttgctgccgcggatcccctagcagcccccactgaaactcctggtgaataaagaaaccatagtctccgtttggaataacggggacaagccattcaccgaattcatctttatcaattggcgaatgaggattaaatagataacattcatgctgccagtccagcgcatatataaactcttgctttaaggtacaagattgaagtgcctttagtatctgcagtacgatgagttccactgcattcatggtcagaatgattgggtcgcttgtgtttatttttgtattgatttttgtaaagactaattccgacatgaacgcaccctttcttcatgcgttttcatataaccctgcacccaatcttttaattcttcaatcgtatgcagatacgaatcaggcgaatctttcagatcaaacccgctcaaatacacgagcatctcccaaacgttttcatcctcaacctccggatcatctgcagccacgtactcgcatgcccaatccgacacttcttccctcgccgcttgaccgttcaggatcagattagccttcttcagacattctgctattgtgggttctttcacgtcagaagcctgcctttcttgtttaaaatgctgaccaacagccctcttacccgttcgtgccgcccgatttcccggctgagctccggataatccgttaaagcgtttttcagctgcgcatattgcggatacagctcaaaaaaggatttatataaggctttacgctggcgcgcaggcatttgtttattcgccaaaacaaaatctaagctgccgcagacaagcgcgaaatactcataaaaatcccccgcgcaggcagccccctcaaagtcttcttcgaatctccctgtatctgaaggcagcggaccctctaattcttttttgtataatttcaggttgcggatgacgtcatcatttaaagaatatctgttggatttcatcatctcattttgccgctttccaattactgatatcccgcttataaatccccgaattcgagaccacgtaaatggcattgccagtcagcttcagctgatgcccggaaagctcatcgccatccggatcacagcacgtcacctcttgcatcggcagactgacatcggccggtatgagagacagtgaatgatcatctttgcatacccaaaacccgtcttctgaaatcgcaagctggtcgtaaaccccggaatatgctttatcagaaataatccacactcgtttcacgtcggtttcatcaaacgcagcaatgactgtataagagtaatacagcatgtagatcagtccgtctttttctgcaagtgcatagcagtcatctgccgcgggcgcgtatatttccgaaagctgctgatcaatgtgagttttcttcagccggccatctaatgaatagcacagcacactgtgcccatcaggattttcatcactataagtaccttcatcacttaaaccgatccacaggttttgtttttcatccaaaagactgcatgaaacccctgaaggcagagaaaatgcacattgttctgttccatctgctgaaaataccttcactttatactcatgcgattcaaagtaaatcaacacatacctgtcagccaaactctgttgaaacagcataatatcctcacacagaatttgttcatcgatatgaatcactcgaatatcacctaattcatcgataatcgtaaacgaaagcccgtcattctgatgccgtccgagatacagatgcccgcaattatcaaaatggaagaaacgtccttttattgattcgtcatgtatcttattcatttttattttcatgtcattgccccttgaatttataatgcgcggcgagctttttttgaaattcatccggaacgatctgatccgggaatacaactgatacccagtctaaaacaagattatctaagggcctccatgatcctaacgtttttcccgcaatctcctgatcaatgcctagaatacagatctcaaaatctctctctccgtaaatcgcccaccttaaagttggtgaagcccatacgacgcgggatgcaatattcattatgcagtcatttttactgtgctttggataatcagttaagattgaaagatattcatcttcggttatatttaaaggaatctttaaccagtcaaaatagccgaattccacgtgaaaccgattcatatcatcaggttgttccagaacagccattaagataaattcatcgtgatgatgatgcgccaaacttttgagcatctcccagccttcttcagacaagacccagtggaattcctcgaatagataataatgtttttgttgtttaaatacttgttcgggcaacgttttattttcatgaaataaggaatatatttgggattgaaaaatcgccaatttctttgtgttctttataaaaaagggatgcatcttgtacctcttttcgacggtttacacacaagctcacagccgtattctgtgccacacagacgcacttgtttcattaaaaaatgcctcttgttttccccaagcttgtccattaacttttctcttatcactgagcacttccttagaagttattttcagggtgcacagaactatcaaaactttaccaaatataaatcgttatcatgaaagataaacatgcggtcctggacggctctgtacattgtttctctttttctatcaataccgtgtatcatgacgtcagcctctgataagcctttgttctcttcatgaaatgcaaataggttatcctcgtgactctgaatcagaagcaccctttttttcgaaacggacagctgatcacaataggagtattgatcgccgtccagcacatattctgcaacagtacgaattctgtcacgttcaatctgataatgcccgatgacacagcaatcctctccctcgaaacaagcatacaaatcggattggatcgattgtacggcatagcattcatgcatcatttctttaaaatcgtcttcaaaataaaacgttctgtcttctgtatgaaaagcaaatatcgctttcccttgagggtttctctcatcatacataccctcgtccgttaatccgatccataataatccatcctcacccagatgaaatacattggcgcttaatagaaaagaacaaatcggattgattttattactgtttacgcagtatacggctaattgacacgtatgattttccaggtaaacgatcacgatagtgtcatcatacgaatcaaccagatagaaatgggcatcttcagaaaatccgtgtaactcttttttgattaaaagagagctgcctttcataacctccaatattactttgtgatcatgcaccgacacaataaatacttgatcatcccgacccgcattgaaataaatgatattttccctttcatatgacccaacacgctccgcggtaagttttaacatcagcaacactccgttgaataggaacctgaaattttatattaaattaatcaatgatatataaatctgctgcatcgtattcaaaccaaatgattttttcattactttcagtagttacatcaaccttttgagtgttcaggttcatgtaggacttatttttggcaggatttgctattataacaacaaaatcattgatcgatgctaaaaaatataattcatctaataagtaatctgccatcagttgttctttggttaggacacattcaatatgaattaactttttcgatacagtattcatatttatcattttcttttcaaccttcctcttccattcttcaataaaagaaggtgttccataacttctatcagaacggttccaaactctaagtcattcattaattgagaaaaagtatctttactcactagatcacatgaatatatcgagttgtattgaagcggattaatcacatccagattccctatagccctcaatgattctttttgtaaatttaaaggagtgttcatgtttacctccgcgaacgatttcgttatgtaagaaaagagaggctgggaacctctcttatttatgatttcgaatgatacgcataaaatgattgatcatcaaagcgaactgtttcagcttctacagcaatcagcattctgttcatgccaatgagaaaattagcatttgattgatactccggaattacagcatttgatagattaccgattccttccgggtggtaactcatctcaaatacttgccaattgtattcttccggatctattttttctaatctcatatcaccaatatctgcactaaaataaacagatgctgcattttgaaaaagaatgttatgcgtaaattcggctttattttcaacgacctgaatcttaagtgaaagctcttttttaaacacatgaaagtcacaatgaaggacagcgcaccctccgtctatataatctacccattcattaattgtcttgtacaccgtttatctccctaatgaagttttggagtctttgagatctgattttaaagtcttcacgaaaatttctagcttttcttcattacagttcaatttatagaaggttgtatttgaattattttccataaatctaatgataaatctgtaatgttcgttttctttatcaatacttagtataaaaaatggttcaattgtttctaaacgtatcctgtcttgattgcctgctgataatgcttcaatatctgatatcagcattttatattcactttctaataaaacggcagagtaatcgcgaacgattgctttattatgttccaacagttcaaacattgttgagataaaaggatcatcctctgcttcttgataccttctcggtgttatttcaagttccagacaaccgtctccgattttggccatgctgtctcctcgttctctacttaatagctttaatttattagtaaatgatttgaatgacgctctggaattcaagctaagtttcaatcgattgttcaccttttactgtctcagttctaatcacctacccacttattatctataatttttttaaaaaaagcctgttgaccaaaagatgatcaacaggctcatctattttttatttaatgcccttatttaataatgtttgtaatattttctctatgtctagatcctattctgattgtctcggaatctgttatttctatatgataaagaacataatccagtaaatctttaataattgttttctctgctaaagaagctccatttaatatatcttttaactcaacatctttttccaataagattatattttcatgcgcaattattgtatttttgtactcttctgctgaggtttttataaatgagatttttttattaaacaaagtatttgtttttaagctcgctgagaatatacaagtatcactatctttatttgaaacagagtaagaatacattgcatattgtttattttccatattttttaatataacaaatattaaatcctctattgttttatactctttttcaaccgaatcatagtcattgagagttgatatttcataaaaatagtacatttaattctctccttctatcttttatacactgtaaacggcatgagatagaataagtttcttcgtcgtattgatagcctgttagcggtagcgcttgtcttttacttcgtctcagcagtatgttattcccacatgttccgtgtgtagtttggtttttatcatataagataagagaggctggtaacctctctaaatctcttctctaaaaataactaaaagaagctataaatcattcttttaatttttttattatatctgtagcttctaaaaacaattgatttatcttaccttggatttcttttgctatttcctcttcactttctaaatctgttaaatatcccgctttccccgaaaacaaccttctttcacaaacccatatatctaaatggtctacacaatagccgtcttcattatcgtgaaagtcggtgccgttcaaataagctacagaaaaaaatatcagtgaattataggtattctcaaaacaatctgagggctgtacttcttttcctatttctttttcgtttccgactcttccaaaagcagcttcaattttcaaacccatttttctaaacttttcttgattgtttcttattttgtttaatgcaatccgttcaaattgtttttctatttgtaagatctctttttgtgtaatagatttcaggttgattttcttcatattacacctcgttcagaactcaaaacatttactactgtcagtatctgtacaagcgaatgtgagaaatcagtcttttacaattcagtcttcatgatttcttccattgacattccttcaaaatatttatagagaatagattctacagccgaatgtccaaatatacctaatgggttagggatgtctttgcccgttttctcatctgcctctgctaattcatcttctgatgcaaatgaatcgccttcacttatgagatatttaccgtcttcatataaaacaaattttaattgagaatgactgtttttctctattatctcttgaggcatcttggatattactttccaatctccttgcagaaaacctgtgtgcccagtattagccgcaaatattttcttattttcttctttcattagacgaatgatttcttctctgctaagtgtattttcagtgaaaatattataatactgaataagaatgtcatcgtctttattttttgatagatcaccttcaataacccaagcataagtatacttcccgatcttatccaaaggtatttgaataacagctcccggtattactttagctattgatttcgctttcctggtcgttgcctttatttctactattcgcttatcaactaactccgtgaaagaagaatttccatttgtattcataacggtaactaaagttgctaagaattcttctaatatcggttctctatccagctctctcttatataattcacaaaatttttctacagcatcaaaacatatatctaagccttcatcactaagtaaaactttcttgtttttatattcttcttcccaatatcccaatagaacggccttctttcttttctatttcataccgctcattccctgaataatatcgtgtctgaattctgtacgcccagaggttaaaaaggtttccttcatcaactactcaatatcgtaatcctcccactccctccagttattatttacatcacctacatcaactgaacctgcgcctttttcaagatattgcgcaaatgattgaaaagaaattaattggcttggatctgttaggtaatcaggatattcccaatcctctgtttcgaatactccttctgcttcgctttttagatccagtatatttaatagtttttttggctttatccaaagcgcctctctaaaagaagcatcctcaaacaaattcctgaaataagttttccaagccctttcttttgtactcttttggaattcatttctttggtgaatatttacgcaataacgagactctttaatttcaatttccactacttcgcttaattgttgaaaatcactttcactatatgttattttctcacctgcttcagtctttagggcgaagtcatcaattattatcgatttgtagttgtctgaaaaacagttactataggtatgaatagccagaaaaggtcctttagaatctacttcgaagcaatgaattgccagtaaccaattgtcatcatttaatcttaataaggtacatttactcccaacataattagattcacgccattcaaaaattggtcggtttaattcactaaattcatcatctaataggctaagaatttctttacttttaatcaaaattcattctccttattaaattatttttatattttatcttccacataataatttatttaatatataacggattatttccaattactgcatgtctataatatcttcaaaagtattgaacagaatctgtgtgtgcccattttggccactctgtgttaccatcatcatgtttttgaatatatgctatctcttgacgggaaattgcttcggcaattgattgaaagaaaggagacaaactaggcaaatctttttctccttctggatgcatccataattctgttgaatacaattgttcatactccgaagagagacccgctatttccagttgttcttgtttcgtcagccaaagtgtgtcaagaaataatctatttttggtcatatgcctcaaacatgtaatccattcattctttggggaaatcttatcttttatttcctgctcaataaaaaattgaaatgttttctctctaagagacacattgatttgtttacttgtaaaacccgattctatatcttccaattccagcaaatttcctttttcatctgcaaataaaaacggttcatcatctaaaaaacttacttcattatttgttaattgattacccaccgcataaaaatcaatagctggtcccaatctcgacaatccaaacagctggaacgttaaaagccagttatctctttcaataaaaatcgaaagcttcccttttgcgaagtcaaaattctcattatcaagaaacggaaactcttccttattgaatgaatcgttaagcaatgcgagaatggcttctttttttccacccaacatcctcacctccgttgatgtctttttctcagaatagcactagtatatcctccttgttttcgtgaacaagtttgacaatgaggatatagcctttgtcgctggcctttcttccttaattttgatactggttggtgatccgcaatccaatttctgcttttagttccagggtgccttctaccacaagtatgacagccatatttattcccaattttgtttaatactcttctttcctttttatttaacctgctacttgtacttcttgcaggaattgaccttctagcgtatttaccaggttttaaatacttcttggcggccttcgcaaatcccaaagccttcttagcgcctttaaacactttcccaggcccaaagttcgaagccgctgcccaggctgcacctctccatcctttacctgatttataggccttatatccatcataggctgcaaatccggcatttactacaagccacacccaatgcccatccggatcgacgttcatgactgggttgttgtttccgtatgcatatccattctgatctaaagaatcgccgtcacttcccgggtctgggtctagtgataagaatacaccgtttcttggttcgtagtagcgggccatgagatagtacaagccggtttcttcgtcgtattggtagcctgcgtagcggtagcggttgtcttttacttcgtctcttgcttcggtttttgtcggatttccccacgcatcgtactgatatttggcaacggtttttccggtgctgtctgtgatggcgatgacgtcgccgtgtgcgttgtagtgatagaaatatttcttgccgttctttgtataggataacagctggccgctgtcaccgtacgtgtatgattttgtgacgttgttgtctgcgtctgtttcatacaggacattcaagctgtctccgtcgtagaagtagtttgtgacgtttccgttgacggttttttggattctgtttcctttttcatcgtatttgtatgttgcgaacggcttgtcttcgccttttttcgttacggctgtcaggttgtcttccgcgtcccacgtatatgtgaatttgccgtcggatgtgcggttgccgtttttatcataggacaggtcttcgtcattcaccttcgtcagctgattcatgatgttgaaggatgcgttgactgatttgcttgcgccgtcctttgtggtagtaacatttgtccggttgccgaagccgtcgtacgtatattgaatgacggtgccgtcttcatgagtttctttgacgagctggttgagcttgccgtattcgtactgcacctttccgcccgctgagctgtcgatgaccgtgcggttgccgttggcgtcgtattcatagctttcccggaagatgctgccgccgtttttcgctccgatatgaagagagctgacaagattccgctcatcatatgagaagctcgtgccgacttcatttccgctgatgaatgtctggacattgccgttttcatcataatcaaatgtataggctgaagtgccgtctttcatttcaatcatttgatcaagtttgttgtacgtaaagctgtttgttcctttttggccgccgtggctccatgagaaagttttcagcttatccgaatcagccggatacgtccagctttggctgccgccgcggtcggttaattcggtcaggcggtttttgttgtcaaaggtgcgttttttcgttgtattttgttctttgttcgtgaccgacgtttcattgccgtttttgtcataggtaaagttgtatttttcagtgccgttatacgcttttgacttaacccggtcggtgccgtcataggtcagcgacacttcattgccgttggcggaaacggttttcgtcaagttactgttggcgtcatattcactcttcagtacattgccgagcgggtcggttgttttgacgagcttgcccatgacgtcatattcatattgataggtctgatccgcgccggtccgaatcgtttttgtcagctcatttccttccttgtcatagctgtgaaggatggatgtgccgtttgacaaggtcagctttgtcagctggtcggcctgatcgtattcgtaggcggttgtttcgcctttcgcgtcggtttcagacattttctttccagtctcgtcatatgaagcagtgcttgcataccctagttcgtcttcttcttttgtgacgtagtttcctttttcgtcataggtgtttttcgtcaggatgcttccttcgattaaacggatatcatcaaaccacgccgttcctgtggcgcttttttggaacagaatgctgagttcgattttattgatcggctttgttttcggaatgactgccgccgcccggttccattcctgtgtcccctgcgggaatttggcggtgtatacgcccgtcgtgccgtccgcataagtgacgtcagcctgaagagcgtaatcattgtcgttcgttaattttacgccgtcagccttggacatccctgtcagcgtgatatataccggcttatcgtccgcgctttggcctagcgtaacggtttgttttgcggccgcattggcttgtgatgcatttgtgcgggacgcttttaatgagctgtcatcatcgaagccttcatcaaggtcagcggcggctccgcttgtgctccagccatctgttttggccgtgaaactgctgttttgcaccgggttatagcttgaagagacttcgcctttttccagctgaacctgatcaaaccacgcttttcctttgccgtccttgtcgttatgatccacttccatatagacgatggcttttcctgcattggccggtgttgtaaaggtgatctgccgtttcgtccagtcattctttccggctaatgcgcctgattcattgtgaatccattgaatgcgtttttggtctttgtcacgcagatcaatgttgaaatacgctcttgcctttgtcagatccgttttgatctggccgctgagtgtatacgtcgtattcggctcaagctgcacttcctgcgttgcggacgcatggccgtgctctgttccggcagtagaggattgtgaggtgatctccaatgctttttgtccggacagcgcgccgcttcttcctttgacagacgcgatgcttccgctgtctctcgtagcggtgagattccagcccagctttgttccttcaaagctgccgtctttcagcagacttgccgaagctgccagctctttgcttgattgaatgagatttccgtacttgtcatacacggcggctgatgaggattttccgctttgatccgtttcagaaacggcatcaagtccgtcgtacgcaatatcagtgatgttcccctcggtatccttcattttcgttacgtcattgtttttgttgtactgatacgtttcggtgccgtagttgtcttttacggctgtgacgttgccgtctttatcatattgatagctttctgtcgctttgcccgcatccgcgtcgttcgggtcggtgtcctgaatgacgttgttgccttcgtatacagtgttggtcgtgattttcagcccttcggcatcatcgatcatctggatcgggttgcccgcctcgttatagccgtactgcactttgcggccgttcggctgcgtcatgagcagcgtttttttgtccgcgtcatagctgtagtcgtacgtttcttttttcgcattgacggctttggccagacggtggccgctgtattggtattcagtgaacagcggtttatcatccgtgctgtttgcggaatactgcttgacgaggcgcccttcggcatcatagtcgtagcttgtgacgctgccgtcagtatccgtcacctttttaagaaggtctttgtcatatgaatatgaaatctttttgtttttcggccctgttaaagatgtgacatggccgttttcatcataggtaaatgtcagcttgcgccctgatgcgtctgttatggcggtcagctgattgctgtcgttatattcgtatacggttgtgttgttgtgtccgtcaacgattttttggagcttgccgccttttttgctgaaataagcgttcgtctgatcttttgtttttaatacaaattgatcgcttgtttccgtaagttcgagataaacgcccgtcggcggctgatacgtgccgtcagattttttcgtgaagacatgtgttgtcgcgtcctcatcaatataaacggctctgccgtcttcagaaaggatcgacgtttccgcatcggcataccagccttggccgaacatatggtcagagctgtcaaggctgttgaaggtccgggagagtccgagccccggtccgcgtccgtcgattgacatatcttcctcattgacgatgacatttcccgtcgcgccgttcagctgtccgtccggaatgtcgataatagaccagaattcttccgttccgaggaattccgccccttcatggaaaacagggttaaaaggtgccgtcggtatgctgtcaccgtttgcgtcataggcggtcagcgtgaaggaatagttcttcttccctttgtaattgccgtttgcgttttcgtaaacaggtgaagggtcaagcgccagttcgccgccctttccgtccgtgtgaagctggaatcttcccgctttcacttcatcggctgaaggccagatgtgtttgttttgggtcgtccaatgatcggtatccccgacatcgaatgattgatagtcttttccgttgtagatgttgattttgtagcctttggcgtttttgactttatcccatatgagattgacataacccgtttggctcgatttcgtgttcgtatagacatagcctgtcaggtttttcggctttgcgatatcaggcagcgccggactcgcttccggtgaggcgatcgcttctccgtctttgttataagcaatgactttaaatccgtaggttttccggttcgcatctccgccggcgtttttataaacggagcccgggttgatcggcaattccgcgccttttttgtctttcaggtgaagcgcatattttccggcgctgatttccgcctttgtcggccagatgttttgatcttttgtggaccaggatgttttatttccgaggtcaagcgtttcaaagcctttgccgttaaagacttgcattttatacccggctgcgcctgatacggctttccaggaaagatcaaaccagcctgtggcgttgttgttattaaagcctttcgtgcttggtttctgaactcttccgatattcggaatgacgggcttggcggccgcagacatggcgccctctccctggtcaaacaccgcgctgaccgcgacccagtaatttttacttgccggatagctgccgccggcgtttttatagaccggcgaaggattaagcgctaattcagttccgccttttccgtctgtatgcagcttatatttgccggagtcgatttccgcttttgtcggccagatgttttttccttttgtgctccaagaggttgcattgccgaccggaatggcctggtattctttcccgttatagagccagactttatagcttttggcgccttcagcttttttccagctgatattgaaaaatcctgtcgaatctccgttatgatacgctttgacagacggcgtgtccgccttcggaattgtgtatgtcacttcaatgtatggttttttagcagagtttgctgatgacatcagcttcttccaatattcttttccgttgccgtttgcgtgaagcttaaagccgtaattggcgccgccgctgttccacgacttgactgcggaggtgacatcgaagcttgcccattggcctttatagacctcggctttgccgatgtttttggagcccggcttgttcttccacgtaatcttggcattgtcgtaattgctgttaacggtgtcgagccaaagccccgtcgcttttgatccgtaataggagtgggctgtgtacgctttgagcgtcgctttcgtcaccgtcatgtttttgatcggctttagattatcaaacttcataaaagcgtagttcgttccggttgtgccatcataatatccagttttcagcacgtacgctttcaatccggcatcccatttctgcgatgcggcagagtagtttgtcgtcgggtacgcgctcatgacaaaggtatcggatgacacagatactgatgttgaagggtcaatagataccggataaacccgcttgggatctttcagccatttttcatcggccgttacatggagcaagtagccttcactgtttttttcaagcttgaagctgacatcttctgacctgctgacttcacctgacttttcgtcgagatctgagtcggtcataaagggcttcggcacggtgtagacgacattgtctttatcatcagaaaacgcgatcgagccgtcttcctgttctttagcctgaaggtcggttttgatttgaaaggtgaaggaattgtagccttcatatttgtgaagcacaaggtcttcttttatgttttcgttaaatgtgtaggtttgtaaatcaattgcaggaaacacttgctgatacgtaagctcgttgctgtcttcccttacttttgctgaggcatctgtcggagtgattgcagcctgatcggggccttttgcgccggttaatgagtatgtgagcttatgatcatcatgttcaaatgtagcgtataatccgtttttcatttgcttcagaaaatcggaattcagcactgtattttccgttccgacttcctttgagccggttttcaattcaggagaaacgtcttcccagtccgcattggcggtttctttcgtatgtatggggtctgtgtagatttcctgtttgtacacaccctcgccttcatagtaaagctttgaattctcagttctttctgacgtgatctcaccgtcttgattgatatctttttgatcaaaaggcatctgctcagatgctttttccgccggaagatctttttccgggtctgcggccggaatggcggcggttttcgcttgatcttgtttttcacgcgtttctgccgcaaacacatcggcaggcgcaatggaaatcatcagcgttgccgcaagagtgccggccagccattttttccacttgttcttttttcctattttcataggttctcctccttcttttgtaatataggcttaacaatagtaatattattgaaattgtttatcaatattttcctaggtatttaaggttattttaaggattatagggattttgaaccttttatcatataaaaaaaccgccggctgccggcggtttttcgtattatggatagcggagatttgtattttgcgctcccgcgtaagattgggcgaagtttttggcgtcctgggctgaaagggttccatagctgtaatttgatctcggattccagccggtgcgcggtgatttcggggctttgagcgacgggaatgaaccgatgtcggtgaattgggccgtcccgtagtcgtctatcattccgcctttttcatttccgttaccgaaatagttggcttctgagaaaacagtcgcgtttgtatgaatggtgaatcctaaattgaaattggtcacatagttgtttttcgcgtgaaaatagccgtatctcatcaggcccggtgaacgcacatagacgttattaaaatagttgttggtgatcgtcatatgcggatagccgatataattgcgtccttcgttatcatcattcggataaccgagaatcaggccgtacagatggtctgtgaatttagagttagacagcgtcacaaaatccgctttggcgccgacatacagaagctttcccaaatcactgtggctgttcggattgtagctgtgtccttcaaaccagacgtggtcaatccagtaattctgtccgttcgctatgtacatcggaatgtcgttgttgcctgtaatggcggcactatggctgataatgagatttttgaaaatcacattgtttgagccggagccggtggtcagatagatgttggtcagcctgtggctggtataagagccgacgatggttttattggcgccgactgtcacgacggctttacccggggaagaaatatcacttgtgatgacgatggttttgcggtccgttccgcccgcattgtttttcagatcattaagattgctgacgtagacgacggggccgccctggcctcccgatacggcggattttgcttttccgttatgatccttcgcatttcccgcgaatccggtaagtccctgcatcacatccggataagccgctgccgcttctgcctgttttgatacggaacatacgatggccagacaaagcgcaaatccgagtgcagccaagaaagcgagatgacgcgtcttttttatcatgcccttcactcctttaatttcttaaattgtaaacacaagaagtattatacaattactatcctctttttccatgatctgtttgtctgctttttcgttatggctgaaaagccccaaaataaaaaagcagccggtatggccgcctatatacgggtgctgtctgcctgagtttccgccggcacggctttttgctttcgaatcagagacagcgccattcccgcaaaaatcaatacaatccccaaagattgataaaggtcggggcgaaatcccgtaaatacggtgtcaagcacaatcgccaccgccggatcaagaaatacgatgattgaaataaaccgggtggataaaaaccgcaagctgtcaaaaaagagcaaatacacaattcccgtatgaatgataccggtcgacacaatcatgatccagttcacatgcgacaaatcagaaaaagcgccgaaacggacgaacgggagaaggatgataacgcccaacccggtctgcaaacaggtgacggcgtatgggctgaggctgttgatgcctttcccggccagtgtcgtaaaagcataaaaaagggcggccagcatggcccaaataatacccgatcccatcagctgagaaaatgatgtactcccgttaatgccggaaatcagggcggtgcccagaaaacaaatcacgatagaagtgacggacacaatatgcagtttctcccggtatataaggctccctaggagaaggacgagaaccggagccagatgataaacggaaatcgctatcgtcactgatgtctcctcaaacgatttaaataaaaacacccagtttaacacgagaaaaaatccgcaggccagtgtctgcagcaattcacgccggttccattgttcggtgcggtatcgtccggaaccaaaccagcaaacgcccagaaacaatgaggcgcacagacatctcacaaagaccagttcaattgaaggcacattcgtatgttctgagaaaaagccgattgatccgaaaatgaccatggaaatgaccattttgatgacggcatttgatgtttgttcagcttgcattgatttgcttcccccatatcattgactgtttattcagacaaatactaacagccattttacttgattcagaggaagatttcatcctatttttcgaaagacggcggtcttttctcataaaaaaaccccgcatcagcagggtcttctgtttaatgaacgatcagtacaggacaaggagacaattgtgagaccttatggctcacgcttccgagcatcatttctttaaatccgctgattccgcggcttccgacgacaatcagattgaaatgctgttctttcgctatgtttaaaatttgatgcgcaggttcaccttggacgtacaggctttccgcatttaccccgctttcagccgctttctgcttggcctcctccagaatggccgctcctttttgctcgacttcatgtttgatgtcttcaatgaagttttccggaacatagacaatccctgttaaggctgatgtggagacaacggcttcacgtcccgcatagagaatggtgagttcagcctgctgttctatcgccagatggatcgctgcgtccaaagctttgctgctcatgtctgaaccgtctactgctgcaagaatttttttaaacatatgaatcccgcctttctgcttttattgtcctcctctctttactgaatgtcaattttgtcggctttctccggaacattacgcttacagactttctccgtttgtggcgatgacgtttttataccaatccaaactacctcagcgttattttttaagcgcttaataaataggactttattctcttcttttttagtattacctattggtaaaagtagtgataaaatggaattattgatataaaaaaggagattatgatgagaaatcatagaggcttccatgaggaaattcagcaacaacaaaaactttatccaacatcacatcgcattcaaccggtcagcccaaaagaatatgcagaggttttgactttacatacggcaaaacaactgagcgagacatttcaaacacttgtggatcaagatcaatatgaacaagcgattcagctgagcgagaaggttgcctctcagcttggaaaacatacgaatttttcattgccactttccacagtgctttatagtttaaatgaaatggaacttcctatttcagaggaattttctctacatcgtctgaaactgctaggaaatcatcaaactcatgagaactttttcaaagcattaaaacacgaaatgttaacggcggatcgggtagactttatggttagtttcacaaggtggtctggtgttcagcttttgatccctccgcttcaggagcttgctaaaagacatgtccctgtacgcatcattacatctacctatatgggtattacagaaacgaaggcgttaagacatcttcttcaatttgaaaatgttgagttgaaaattgtaaatgaatataaaaaatctttccatacgaaagcatacttatttgaacgctgttctggacagcatagtgtcattgtaggatcttcaaatctatcacaagctgcacttatgaccgggtatgagttaaatgttagactacctgaaaccagatatctccccgtttatcaacaaacaaaagatttgtttgacactgtttggaatgaaaagacacagcctgttgacgaacaatttttacaagcctatgaggaattccaaacaggaagccaaaaggtaagtgcttcctttgctgctcaaaactctctttacaaaacgaaaatgtccccgaatgccatgcaaaaggaagcgttacgaaaccttaaaaaaacaagaaacgaaggggagacaaaagcagtcatcatcgccgccactggaaccggaaaaacatttttagcagcatttgattttgagcaatttaaaccaaataaatatctttttcttgcccaccgggaagagttacttacaaaagcaatcgaaacattccagaaagtcaccaataatcatgaagattttggtttattgactggaacgaaaaaagaaagagataagcgttttttatttagcactgtacaaacgctacataaaaaagaaacaatggaatccttttcaacagatgaatttgactacattgtgattgatgaattccaccatgcagaagcatctacctatcaagctgtattaaactactttacaccaaagtttttattaggtttaactgcaacaccagagcgtcttgacggtaaagatgtgcttcagatttgtgatcataatgttgtttatgaaattagactccgcgatgccctaaaggcagagctacttgcaccatttcactattttggaatttcagatcatactgtagattacgaaaaagtaaaagtgaaaaatggactgtacgaagagaaatcgctagtagatcatttaaaaactcataaacgagtagaatatatcattaagatgatcaacatgtatggattccacggcgagaaaatggttggcttaggtttctgtacaaacgtcgaacacgcaatatacatgagtgatgaatttaataaattgggattttatacaacttacttaacaggaaatgattctcctgcaaaaagacaagaggtcattcgtcatttggaggacccgcaccacagtttagaacttatatttacagtagatattttcaacgaaggaatagatattccaaaactcaatctactattgttccttagaccaacagaatcaccaacgattttcattcagcaattaggacgggggcttagaaaaacagacgacaaagagtttgtaacgatactggattttatcggaaactatcaaaagtcatttgttattccactcgcactatctggacaaacaagccaaaaatcgtttgataaagattccctccgagtggccgtgacgcatgagttttcagatttacctggaggatcttatgttgacctttcagccgtaacgaagaaagaaattttaaataagatcgatcatattaaactaaattcagatgccatgctgaaaacgttatacaagcaatttaaacaagagctaggacgctctccagaattaattgattttctatactctgaacaggcacctgggcttaccttttttataaagaaatacaaatcgtgggtacagaccaaaaagaaaatggacgatttgaatgttacagatgaagcaattctcaataaccccttggttgtagggatagtagcaaaattagaacagcaattacctattaaatggccttatgaatggttaattttacagagcggttttcacaaaaatatcatcacaatagaagatgtaaaagaatcgttagaaaaacagtttcatattcaaatcacaacagatacacatgatgacctcattcagcgagcaatggagcgtttaacgaaatcagatcaaaaacagaattggcgctttggtacattacaaggtgatacattcaagttagatccagaagtgagcgagatattaaacgatccattattcggaccgtatattaaggagcgcgtccactatggactgattgaatttagacgtatgaacaatatagaagcccttgcttcaaaagagattaagcttacaatgtatcaaacctatacaagaaatgaactcatttatctttttcagtcaactaatcaggaagggacttggcgagagggtgtacgtagagttaaaaatcactatttaatctttatcaatttgaataagtcagaaaaagtagaagatcatttgctatataaagattattttattgatcctagccattttcactggcaaagtcaaaaccaaacctcacatacatcaagcatagggcaaaactttattcaccataaggaaaaaggataccatattcatttatttgtgaggaaattcactgaaatgcacaacatcactttaccatttatttatgtaggagaagcggattacgtatcaagccacggagacaagccaatgaatgtcaaatggaagctccatcagcctgtcccagaaaacttgtatgtggatttaacgaattaaggcagatacggtcggaagatcagcgggtgcccactctagtgattctagctcacgtataggcacccatctgaattccgcatgctcttttgctaccggcttccctgatacaatcttcgcttttattgaaattaaattgacgatgaccttctcatattcatgatgaatatcggctattacatcgcccgcaacaattttacagtcaagttcctcttcaatttctcttacaagtgcttctcgtgcattctccccttcttcaagctttccaccaggaaactcccacagattaggcagagacattgttggagaacgtagagcacatagaatttcattgttttcattttgtatgactgcggcggctacttttattgtttctttcaaaattaaacttcctttcgttttttcttaggtatgtattcaaatttttcaattttatactgttcactgtaaacgatagaggttgaatccatcataattcaaatggtttattaaaagcaatagaaggtcattctcctaattagcaagaaaaaagcaccctccaaaatggagtaggtgctaatttacttcactccccaaacagcctccccatcaccgctcagcacactaaacgtcacaacttctttctctctcgctgagtcccattctttcaggaagacgccgtcataatttgtgccgttcaggttgattcgggctttgctgctgtccgttattgaccaggttccggtcatttccccggaaatggtgccgtcgttgttaagccggatgttttttggggttttgatcgtagctgtgatgtcttttccgtgctggatgagtttgtaggttccggatgcggcggccggcggaatgtgtgtatccggttctcccgcatagcggtatggcgctgcaacgggccatccatctttgttcatgtacagccgatgcactctgacttcatgctcttctcctctgttcgggaaacgggtgtggaaaatgaggtatgatcgtttcgttttcccgtcgtaaaacacggagttgtgtcccggcgatacgtagcccgtgcctttttcagattgtgaggcgaagctatagccgcccatgagtttaaccccgtacggttcaattgctttgtcgtcgaagaaactgccgtcttttcctttggcatcaagcatgttatgacctgcggcgtcatagtacggaccgtccggatatttagagcgcgccacacgcatattgtaaccgccggctgtgtcaagtccgccgaatgacagatacagatagtaatatttcgtttccggattgtagctgatgtacgggccttcgattctgctgtgatttccgccgagcagtttttttccgtagccttggttcgggagcgggaaaccggttttcgggttcatttccagtataaaaatccctccggagtaagagccgtacaccatccagagcttgcctttatggtcaaaaaacgtttgcggatctacgacgttcgggtgaacgtttgcatgatacgtcgtgccgtcttcgctttttccttccatgcctgatttcaaaaagatgcctttgtttttgtagggtccttcgattttgtcactcacggcgacaccgagagcggatcgcggcgagtctcctttacaggcgttatagtacatgtaatatttcccgtcagccagctgggcgacgtccggcgcccacagcgtatcagactgggcccagtcgaatgtctcttttaattcggtgtagacattcgggatcaggggattattgggattgacgcttgaagatatctgctgccactgcatcaggtttttcgacttggcggaagccaaatgcgagccgaatacataatatgtatctcctgttttgatgacggacggatcatgcacgctgacctctgaaaaaaccggatgctgggcttttgcctgcggcagagtgaacccgatgaccgctgctgagaccaggcacacacgaaagaaactggttttcattttctgaaatctcctcgctctcttcttttcttaaaacgctttcaagacaacgctccattttatgatgcggatggcggaaatatgtgatcaacagcgccggcttcacgatgtaccgctttacttcgatagcaatctgatttgtgaaagactggaaaaaaagttttgacttctgattcgcaaacacttaatataaaaaacagttactagttatcagaatatttaagaattgagtgaagcatatatgaccttacacaaagaccgccgcatcgggcgactgtccgtccttcttctgcttcatgagactgaagaaaaccagcagatcagccggctggaacgggacggctggaaagtctgtctcggcagggtgggttcaatggatgcgcataaggtggtagctgcaattgaaaccgcttccaaaaagagcggcgtcattcaatctgagggttatcgcgaatcacatgcgctgtatcatgccacaatggaagctttgcacggagtgacgcggggcgaaatgctgcttggctcgctgcttcgtaccgtgggcctgaagtttgccgtcttgcggggaaatccgtatgaaagcgaggcggaaggcgattggatcgccgtttcactttacggcacgatcggagctccgattaaggggcttgagcacgaaacattcggagtcggtattaatcacatatgaatcagcccatagatttcagatgatagggggctatgcgtgaaacatcattttcatggcatagctcctttttgtatgggcgctttaccaaagtaaaggaaaaggggttgaaatgatggtaacgttagacggttcctcactgacaaccgcagatgcccagcgtgtgctgtttgattttgaagaggttcaggcatctgccgaaagcatggaacgtgtgaaaaaaagcagggcggcggttgaacggatcgttcaggaggagaagaccatttacgggattacaacggggttcggcaagttcagcgatgtgctgattcaaaaagaagacgccgcggatctgcagctgaatctgattctttctcacgcgtgcggcgtcggtgatccgtttccggaatctgtatcgcgggccatgctgcttttgcgagccaatgccttgctgaaaggcttttccggcgtgcggactgagctgattgatcaactgctcgcgtatctcaatcatcgcattcacccggtcatcccgcagcaagggtcactaggggcgagcggagatttggcgccgctttctcatcttgcactggcgcttatcgggcaaggcgaagtcttttacgaaggggcccggatgccgacagctcatgctttagaaaagacaaaccttcagccggccgtcctgacctctaaggaagggctcgcgctgatcaacggaacgcaggccatgaccgcaatggggctgatcgcttacctcgaagccgaaaaactggcctatcaatcggaacggatcgcgagcttaacgatcgaaggccttcagggtattatcgatgcgtttgacgaggacattcacgccgcccgcggttatcaggaacagatggatgtcgcagagcgaatccgctattacttgtcagacagcaagctgacgaccgtccaaggggagctgcgtgtccaggacgcctattcgatccgctgtattcctcaagtccacggcgcatcatggcagacattagcgtatgtaaaagaaaaattagaaattgagatgaatgccgcgacagataacccgctcatttttgaagacggcgccaaaatcatctcaggcggaaactttcacggacagccgatcgcctttgccatggattttctcaaagtggcggcggccgagcttgcgaatatttctgaacgccggatcgaacggcttgtgaatccgcagctgaatgacctgccgccctttctgagccctcagcccggcttacaatccggagcgatgatcatgcaatatgcggcggcctccctcgtgtcagaaaataaaaccctggcccatcccgccagtgtcgattccattccttcatcggcaaaccaggaggatcacgtcagcatgggaaccatcgcctcaaggcacgcctaccagatcattgcgaatacgagacgggtgcttgccattgaagccatttgcgcgctgcaggccgtggagtaccggggtgcggaacattgcgcctcgtacacaaaacagctctatcacgaaatgagaaacatcgtgccgtccatacaagaagaccgcgtgttttcttatgacatcgagcatctgagtgactggctgaagaaggagtcttttctgccgaatgagcatcaccaaaaactgatgaccaatgaagggggacttacaagatgactgatgtaaagaaatcaatccgcgccggccgcggcaccgaacttgaatgcttaggatgggagcaggaagccgtgctccgcatgctccgaaacaaccttgacccggaggttgccgaaaagccggaggatctgatcgtatacggcggcataggcaaggccgcacgaaactgggatgcttttcacgcgattgagcgttccctcaaaatgttaaaagatgatgaaacactgctgatccaatccggaaaaccggtcggattgttccgcacgcacagccgcgcgccccgcgtcctgctggctaattcggttctcgtgccgaaatgggcggattgggagcatttccatgaccttgagaaaaaagggctgatgatgtacgggcagatgacggccggcagctggatttatatcggctcacaaggtattttgcagggcacctatgaaacctttgcggagcttgcgagacagcatttcggcggcagtctgaaaggaacccttacgctgacggccggacttggcggaatgggaggcgcccagccgctgtccgtcacgatgaatgatggcgtcgtcatcgccgttgaagcggatgaaacacggattgataaacgcattgaaacaaactattgcgaccgtaaaaccgcatcaattgacgaagcgctgcgctgggccgaagcagccagacaatccggagagcctttatcgatcggccttctcggcaatgcggctgaggtgcatcatgagcttttgaaccgcggcgtccatattgacatcgtgaccgatcagacttcagctcacgacccgctgatcggctacattccggcaggatactcacttgaagaggctgaccgcctgcgccgggatcagcctgaattatacgtaaggctttccaagcagagtatgaaaaagcatgtggaagccatgctcgccttcaagaaaaaaggtgccgtcgtctttgattacggcaacaatatccgccaggctgccaaagatgagggtctcgccgatgcttttgattttccaggattcgttcccgcctacatccggcctttattttgtgaaggaaaagggccgttccgctgggccgcgttatcgggagaccctgaagatatataccgcacggacgctttattaaaagagctgtttcccgaaaatcaagcccttcaccgctggattgacatggcacagaaaaaagtcacattccaaggcctgccgtcccgtatttgctggctcggctacggtgaacgggaaaagatggggctcgccatcaatgaattggtcagaaacggcgagctgaaagccccgatcgtcatcggaagagaccatttagactgcggatctgtcgcctctccgaatcgggaaacagaagcgatgaaagacggcagcgacgcggtcggcgattgggcggtgctgaacgcgctgatcaacacggcctcaggcgcaagctgggtttcttttcaccacggcgggggcgtcggcatggggtattcccttcacgcgggaatggtcgcggtcgctgacggcagcatccttgcggaacaacggctttcccgcgttctgacaagcgatccgggaatgggcatcatccgccatgcggacgcaggttatgaaaaagcggctcaagtcgccgaggaacaagacattatgataccgatgaaaaaggagcggtaacatgccgaaacaaatagataccatactcaccaacatcggccagctgctgacgatggaatccggcggcccccgatcaggcggaagcatgcaggatcttcgtgtcacggaagatgccgtcatcggcattcacgacgggcgcattgtttttgccggacatcaaggagcggaggaaggatacgaggcaagagacatcatcgactgcgggggacggctcgtcacccccggcctcgtcgatccccatacccatcttgtattcggagggtcccgggaaaaagaactgaatttaaaaattcagggcatgtcctatttggatattctggcgcaaggcggcggtattttgtcaacggtcaaagacacgaaagccgcttccgaagaagaactgattgaaaaagcgctttttcacctcggacgcatgctgtcatacggcatcacgaccgcggaagtaaaaagcgggtacggactcgacaaagacacggagctgaaacagctgaccgcggccaaaaaactgggcgaacgccagccggtcgaccttgtcacaacttttatgggggcacacgccattccgcctgagtaccggaacagccctgacgaatttctgaatcgcatgctgcagcttttgcctgacataaaagaaaaaggcctcgcgcaatttgccgatattttcacagaaacaggcgtttttacggtcagccagtcacggaactacctgaaaaaggcgtctgaagctggtttcggcctgaaaatccatgctgatgagattgacccgctcggcggcgcggaattggcggcagaactgcatgctgtttctgccgatcatttggtgggggcgtctgacgaaggcatcgaaaagctagcggcgtccggaacgatcgccgtcctgctgccgggcacgactttctatctcggcaaacacacttatgcgagagcccgggagatgattgatgcgggcgtacgggtcagtttggcgactgacttcaacccgggcagctcaccgacggaaaatctccagctcattatgtcgattgccgcgcttcatttaaaaatgaccgcggaagaaatctggcacgctgtcaccgttaatgccgcgtatgcgatcggaaaaggcgaagaggccggacaaattaaagccggacgggcggctgacattgtcatttgggaagcgccgaattacatgtatatcccgtatcattacggcgtcaatcatgtccgccgtgtcatcaagaacggaaagacggttgtctcaagggagggagccgctcttggataagtatccgtttctgcaaaaagccggctccctcttcaacgaccgccatgtgacaaggatcggcgatgtgacggaagcgtgggcgggacaaacgatcaaagggccggctttgatcggcgttccgctttctaagtcgtcaatcagccattccggcgcctgctttgcacccggtgcgatccgccgggcgctcggcgggatttccgcttattccgcggagctgcgggagcatgtcattgaccatctgtacgatatcggcgatattcagattcacgtcacggatgtcgtcacatctcacgaacacatttatcggaccattcatgacattctgacggaccagcctgactgggtgcccgtcattctcggcggcgacaactccattagttattccaccattaaagccattgcggaaacgaaaggaacaacagccgtctttcaattcgacgcccaccacgacgtccgcaacacagaagacggaggaccgacaaacggcacgccattccgccggctgttagatgaaaatatcataagcggacaaaacctgattcagcttggaatcagggagttcagcaacagcttggcatatgaacaatatgtaaaagagcggcaggcagacgtgcatacaatggagatgatccgggagaaagggctcctccgaacgatacaagatgtcttgccggccgttcaaaaaagagccgacgccatctttatttcggttgatatggatgtgctggatcaagctcatgcgcccggctgccccgcgatcggccccggaggcctgtataccgaagaactgcttcaggcggtccggtttttagccagtgaggctgacatctcgggtattgagatcgttgaggttgatccgacacttgattttcgcgatatgacaagccgggcagccgcacacgtcattttacatgcattaaagggatttaaattgtcacgttaaagtcaaatccggcacgcgtgctctcggctgccggaagattctcgcgccacgcaaaaagggggagatcacgatggatgttgatcaaggcggcaatcaactcaagcgcacgatgaaaagcaggcacttatttatgatttcattgggaggggtcatcggcacggggctgtttttgagcacagggtatacattgagccaggccgggccgggcgggacgatcgccgcttacctgatcgggggcttgatgatgtatcttgtcatgcagtgtctcggagaattgtcagtagccatgcctgtgaccggttcatttcaaacgtatgcgacaacgtttatcgggccgtccacgggttttatggtcggtatcatgtattgggtgaattgggtggtgacggtaggatcggagtttacagcttccggtatcctcatgcagcgctggtttccccacagcagcgtctggatgtggagcgcgattttcgcggctctcctttttgccgccaatgcattctccgttaaattgtttgcagaaacagagttttggttttccagcgtcaaaatcgtcaccatccttttatttatcatcttaggcggcgccgcgatgttcggtttgatttcattgcacggttcgggtgaagctccgatgctgtcgaatttcacctcacacggcggactgtttccgaacggctttcttgcggttttcatcgcaatgatttccgtaagcttcgccttttcagggacggagctgatcggaattaccgcgggtgaaaccgccaatccggcaaaagatattccgcgttcgatccggaatgtcgcctggagaacggtcatcttttttatcggcgccatttttgtgctgtccggactgatctcctggaaggaagccggtgtgattgaaagtccgtttgtcgcggtcttttcccaaatcggtatcccatacgccgccgatatcatgaacttcgtgattttaacggctttgctttcggtcgccaactccggactgtatgcttccacccggatgctgtggtctcttgcgaatgaaaacatgatcagcgcccggttcaaaaaagtcacgccgaaaggcattccgctgaatgctctgctcgccagcatggccgtttcctgcatatccttgatctcaagcatcgccgccccgggcacggtctacgtggtgcttgtggcaatagccggatttgccggtgtcgtggtgtggatgagcatcgctctgtctcagctgttatttcgaaaacattatgtgaaaaacggcggacgcgtctcggatctgaccttccgcacaccgttataccctctcgttccgatcgccgctgtgatcttatgtttcgcttcatgcgtaggccttgcatttgatcccaatcaaagaatcgccctcttctgcggaattccttgtatgatcctgtgctatctcattcgttttttgagaaagaaacagccgaaacaatccgtccgtgacattcatttggataaaaccatgccataaaaaaaggcacatactgatgaggtatgtgcctttcttctcttattccgtaatcagcgtatgaatcagtttcggcgcttccgctttttctgagatgcggatgttgtcatagactttggcggtcacgtcgtcaacgttttcgcggttggcgtaaagggtgacgagcggctcgcctttttcgacgttgtcaccgacttttttgcggagcataatgccgacggcaagatcgatttcgtcctcttttgtcgcacgtcccgcgcccaacagcatcgctgcgacgccgatttcgtcagcgacgatttctgaaacgacacccgcttcttttgccggaacgtcaattttgtacgccgcctgcggaagtttggacggatcgtcaacaacggaagcgtctcctccctgattgctcaggaactctttgaacttttcaagcgctttgccgtttttcatgacttcctgcagcttcgttctcgcttcttccaatgtctcagcttttttcgccaatacgaccatttggctgccgagcgtgaggacgagttcgtttaagtcttcaggcccttcccctcttaatgtatcaatggcttcttgtacttccagggcattcccgatcgcaaaaccgagcggctgcgacatgtcagaaatcacggccatcgtctggcggccgacgttgtttccgatgcggaccattgctttggcgaggttcacggcgtcttcatccgttttcataaacgcgccggcgcccgttttgacgtcaagcacgatggcatctgctccggcggcgatttttttactcataattgagcttgcgatcagcgggatggagttcaccgtacccgttacatcacgcagcgcatacagctttttatcggcaggcgtcaaattgccgctttgtccgatgacggctaccttgtcgcggttcacaagcttgatgaattcatcttttgacaattccacgtggaagccttcgatcgcttccagcttatcaatggttccccccgtatggccgagaccgcggccggacattttagcaacgggaacgccgagcgccgcgacgagcggtgcgagtacgagagttgtcgtgtcgccgaccccgcccgtagagtgcttgtcgaccttaatgccttcaatggcggagagatcaatcgtttcccctgaattcaccatcgccattgtcagatcggcgcgctcctgatccgtcatatcctgaaagtaaatcgccatagccagcgcgcttgcctgataatcagggatgcttccgtccgtgtatccttttacgaaaaattgaatttcttctgttgtcagttcttttccattttgtttttttacaataagatctaccattctcatgatctatcacctgtccttcatttatgttcagtgaatcaatccgacgatcgccgctgtcaggaagctgacgagcgttgcgccgtacagcagcttcagcccgaaccgcgcgacgacgtttccttgtttttcatgcagccctttcaccgcaccggtaatgatcccgatagaggagaaattcgcgaatgagacaaggaatacagataccactgcctgtgtatgcgcactgaaatggaaatcgccggatgagagtgtctgcatcgccacaaattcattcgataccattttcgtcgccataatgcttccggcgctcaccgcttcattccacggaataccggttaaaaacgcaaacggcgcgaatacatatccgagcagcgcctggaatgtaatgccgaagaccgcattaaaaacgccgttgaccagagcaatgagtgcgacaaatccgatcagcatcgccgctacgacaacggcgactctgaatccatccattatatactcaccgagcacttcaaaaaaggattgcttttcttcttcaggaacgacgatcaaatcctcttctttactgacggtgtacgggttgatgatagaagcgatgataaatccgccgaataagttcagcacaagcgccgtcacgacgtattcaggcttcagcatcatcatgtaagaaccgacgatcgacattgagaccgtcgacattgcggacgcgcaaagcgtgtataagcgctgttcagtaagataaccgagctgttttttcaaactgataaagacttctgattgccctaaaatcgcggatgcgacagcgttataagattcgattttccccattccgttcaccttgcttaacgcaagcccgatatacttcgtgatgaaggggaggaccttccaatgctgcagaattccgattaaagcagatataaaaacgatcggcagaagcacgctcatgaagaacgtcgtctgtttcgcattcacaagcccgccgaatacaaagttaatcccttctgatgcatattccagcaagtagttaaatccttttgcaaaaccgccgacaagaaaattcccgataccggtgttgaggagaatataaccgagaatcagctgcagcacgagcatgacggcgatcggccggattctgattctttttttgccgttgctggcaagccaggcaagacctaaaaacacaatgattccgataattccgatgagatacttcatatgtgttctccttttatttgtattcgcttacaattttttatgcatcaacaaagaaagaggatggcggaagctttcggcttccgcactgctgattaatagtcgctgctgccgctgtctccgccgctcacgatagagacgcccgcacttgcgccgatccggctcgcgcccgcagcgatcatgctgtcaacatcagcttttgttctgatgccgcctgatgctttgaccccgatgtccggtccgactgtttttctcatgagagcgatatcttcagccgttgccccgcctgtagaaaaaccggtagacgttttgacgaaatctgcgcctgcggataccgccaagcggcacgcgcgctctttttcttcatctgttaaaaggcatgtttcgatgatcactttgacgagcgcttttttatcagctgcttcaactaccgcgcggatatcagcttcaaccgcttcatcatcgccgtcttttaatgcgccgatattgatgaccatgtcaacctcagttgccccttttgagatggcatccttcgtttcaaatgcttttgtttccgatgtcgttgcgccgagaggaaatccgataacggtgcaaacgtcaactcccgtgcctttcagttcctccgctgcgagtttgacccaagtcgggtttacacaaacggaagcgaatttatattcttttgcttcttttatcagttgtaaaatatccgctttttgtgtatgcggtttcaaagcagtatggtctatttgacttgcaattgacattgtatgcacttcctttttcctaggatacgtttagaataaccgaattttgaacatatgtaaattggtaattgaaattatgttcatgaattgtcacaattcttgaatgagttttttggccgtatgctgatcggtaatcaaaacgttggcgtactttcctttcagggcaccgtgaatggccttgcattttctgctgccgcccgccaccagaatcgaacgctctttcattttcaagtcgctgagctcgactccgatcgtcctgccattaatgctgctgctgcaaatcctgccttcctcgtcaaaaaagcgcgaacaaatatcgccgactccgcgtgctttcagcaattgtttctcttcttcccggaaatagccgagtctgaaaagcagcgcctcatcccggacggttccgaccgtaaacagggcgatattggcttgtctgcccatttcaatgatccgcttaatatgtctgtcccgctcgaccatctgtttcacatcggcgctgtcaaatataaccggcagcggcaaatacctcggcatcgtctgaaatgcttcggcgaacagctgaatcgtttctgacgagtacgtattaacattggaatgactgatgccgcctttcagctgcacgacttcaacgctctttacctgcttcggctccatgcggcttgcgatctggtacatcgtcgtcccccagcttacgccgagtatatcgccgtcctttacggttttatgcatatagtctgcgccatagcggcttaagtaatgtgtaatggcctggtaatcgtcgcttggagaaaagacgacgtgcgcctcaagcagcccgtatttttcttccagcttcgcgccgagttcgtccagatcctcaaacgggtccatgacgcgaatttgcacataccctttttcctttgcgtactgaagcagccttgaaacggtggggcgtgacagatcaagccgttcggcgatctgctgctggctgtaatctgattgataatatagttttgccgcttctatgctgagctgctgtttttcacgatccatgtcgcgcctcccctctccgcttatcatatcaccaaaacacgcggtaaaaaagcaccctctgatggggtgcctattttttcagcacaagctcctgaatcgcatgcgccacgccgtgttcgttatttgatttcgtttcataatcagcaatctcccttacttccgggatggcattggccattgccacaccgcagccggcccactgaatcatggacatgtcgttgccgttatcgccgattgccatgacgtctttctgttcaatgccgagtttttcggccagcagcttgactgcgtttcctttactgactttcgggtgaagaatctcatggaagaatggcgcgcttttgaccattgtgtatgtttccttgaatgattccggaatggaagcgatcgctttctccagcttgtccggattgtcaatgaacatgactttcggaatcagaatatccttcggcacttcatcgatcgtgcggaaatgaagcggcactttcgtaatgtatgattcgtataccgtgtattcactgatatcccggttcggcgtgtacagattggctgtgtcaaagtaatgcatcggagtatccagctgtaagctcagctcgtaaagcgacttcaaatcctcataacctaatgactgctcggccacgacaccgtttgtatacgtattttggacgagtgcgccgttataggcaatcacaaagtcgccttcctcctgtaagttcagctcttccaaataccgacgcacgccgccgatcggccggcccgtgcacaggacgatattgaccccttccgctttggcggcatcaagcgccccgcggacttcagccgtcacttcatgatgatcgtttagtagtgttccgtccatatctattgcgattaacttgtacatcctgcatctcctttgtatccttttcttcttatgctttcatcatatcgttttttcgtttcaatgaaaaatcaaacggacaagtttctccgccttctcttcgtataccgggtctgcctccggatgcggggccgtcttttccccttgtcagcttgttcgccgccgtcatctgttttctgcttcaagagcatcagccccgccgcaaagaaagggacggccgctatgtccagaagggcaagctttattcccatcgctgcgggaaagtatgcccataatgaacggctgttccgcctgatcatgatataagaaacgatttccagcaggataaacagagcgttcacccacaagtaaatgagtagcgccgcaaacagaaacagcaggagcgtattccgcagcgtgccggaaaacagaagagcgcgcatcatatcaaagaatgaaaaagactgcatgctgccgttgacgacattgggattgtaaatggtaaaacgcccgaactgatcaaaaagcataaaaaataaccataacagtgaaaaccattgaatgatatgtacgatgacacccgtcaaaacgagtctgtcggcagccttatttctcatgtgcatcctccccgccggtttttattcttgtcattgtttttgtttctccgtatatcttccaaatgagcgtatcgttttttcctcttttcaacgtgcttttgacggggtgcggatggccgaggtattcaatctcgatcgtcccgtccgtattttgtgagatcaccttgtacacatctgagggcatggcaacctcgccgcggccttgaatgacctgctttgtcagcacgctgtctttcgtaaacgtgacggtttcagatctgaccccgtccatcgggcccggcttcagccctgcatcccatgtcccgtaataaaaaggggtatcgtctgctttcttttgcgagcagcctgttatcatgacgcatccgaaaacaagaaccgtcatgatgaaaatccgtatgttccgcaacatgatcaccttcctttgaagcttttttacgcctgtaacttaggcggatgccgtggcactgtgcaattgactacatagtgtataaagacttcactagataaggagaatgatgaatgaacccatatcagtactacaccccgcctgcctatttccctcagcagcaggaatacgaagtgaaccgcgttgagtatgagccgtatcagcagcaggaaagctattattatgcgccccctcagtccgaagagcggcagccgacaggtttagaacggagagtcgcccagcttgaaagacaaaacgccgagcaaacgagagagctcacccgcctctcacaagaagaccagcgccaaaaccgggaaatcacgcgtatgaatgagcagatcagacggctgagccagtccattgaaatccatacccgccgcttaaaccgtttgaatcagcgcctgcgcgcagtcgaaaacagactcaatattccttttcacgctacagaaggcggcttctgagaaaaagggccggaatacaaagctcgacaggccatcccgagccttgtattccgctctgtacataacaggtaaatatttgaatccttttcttgcatgaatgcctctcctattctttcacatgataaatgtgtaaaatcaatcactccaggaggttttcatgatgtatcaaaaccaatacagcggaaatcagctgcagcaatgccgccaaacagcacagcagcttattcagcagacacagcaaagcagtcagcagtacaagcaaatgctccagcaggaacagcaaaacattcaaatgcttcagcagatgcttaaccatgaacagcatgccgttcataccattcagcaagcgctgcaggggcatgaagcggccattcaaaaatgccagcaaatcgtgaatgtgtgcaatcagcttcagcaggaagtaagcggacacatgcctgcaccgatggcaaacgctaatgtttcttcattcccgcaaacacagcatcacacaccgtttcagcagcattcataccagcaataggccggtcatgcaaatgacaaagcgcgagataccggctttgtcatttgtttttatctctgttttgtcagatcaatgcgatgagcgggttttccgccgaattttgcttccgcctcatgccttaccgcttcaaacgctcttgcttcgacgttttgtttaaacacatcaagctgtatcaaataagccgcccgcactttcagcccgtggatgatggagatgacccataaaggcagcacgatatacacgcccggcgtgctcggcagcacaaaagcaattgctaaaataataaaatagataagtccgtatttcagccattttttgttcttggcccggtagccgatatagaaaaaggccaagaaagcggtcagcgcaaacggcgcaaaagtcagcagcagccaccagctgtgcagcacttcccaccaagtccctcttttcgtaatcaacattcattcctcctcctttactactataacatggataatcaaggaaggttttctataaaaaacatagacggaatgacgtcttcctgctatattaataatgataatcattatcactgaaatagggggatcattatgaagaagcaatcatggctgatcggcctggcacttctgcttgttttcgcattaagcgcttgcagcggcgcgaaggaaaacaacggatcggcatcaggcaaaggaaagacagacatgcgtacatatgaatcaacaaaagggaatattgacatacccgcacatccgaagcggatcgtcactgacttttatgcaggtgagctgctgtccgttgacgcaaatgtcgtgggggcgggctcatggactttcaaaaatccgtttatcaaaaaacagctgaaaaacattactgacatcggcaatcccgtcaatgtggagaaagtgatgcagctgaagcctgatttaatcgtgctgatgaaggaagaccaatacgagaaactatcgaaaatcgcaccgacgattgtcattccttttaacaccgcaaagaatacgaaagatacggtcagcctattcggcgacattgccggggcgaaggataaagccaaaagctttatggcagacttcaacaaaaaagccgaagcgaatcaaaagcgcctcaaaaacgtgatcggcaaagacgagacagtcggcctttatgaaacgacggataaaggcgaaatctggattttcaatgacaattccggccgcggcggccaagccgtttataacgcgctcggattgaaagcgccggccaaaattgaaaaagacatcatgaaaacgggcgccatgaaacaggtttcccaagaggtcatccctcaatatgcggctgattatatgttcattaccgattacaatccgaatggagaaagcaaaacatttgagcgtctgaaagattcatccgtttggaaaaatctcgatgccgtaaaacacaatcgtgtctttatcaacgatttcaacaccttctatccgtatgacccgattgccgtcagcaaacagatggatatcatcaccgacatgctgatcaaacgggctgaagaaaataaaaaataaaaaaagcggcacagtcatgacactgtgccgttttccctgttcactttaattttgactgtacggagcccggcatatcttcaaatctgatttcttcccaggtctcgacatattttcctttcgccttcactttcaaatacgcgttcttccgaagatctttcccggcgaaaaaggtcacttcttcttttttcccggatgcgttatatccgtctaatgtatactcagtaccgcccgggctaagatgtttgccatctcgatcaatctgtacataaacatcttgctggtgaataaacggattaaatctgtctgtaacatcattatgaaaaaagagaattccgtatatgacggcagcggccgccaagacggccaggattgccaatgcttttttcatctgtgcactccccttacttgttcatttttttcaaatagcttgaccgcactgtgaggaagaacagaagctgaaagatgaaaaaccctccgatggtcagactgagcggccccgctacatcggaatagccttccacggccaatgttctcaaggcaaacagcgtatgcatgacggcaatgacgaaaggaaagaaaaagagaatcgccaattgtatcgtcacgctttgtgccatttcacgctcactcaggccgattttagccagtgaacgatagcgctcccggtcctcatctaaatcagtgaacagcctgaaatataagaaacttgctgccgcgacaaagaatacaattgcgataaacaggccgataaataaactcaggctcggcagctgcaccgtatcatagtacgtcccggcttttgccataaaatcagaatgcacgtcgatatagttgccgtaaatctcatttttcaaggattggctgatcccaagactgtctttccaatgatcatagctgtagccgtataatgacgctttttcaccgagtgatttaagctgatcaaaggtttgatcgttcaccgcgatgatggcatttaatgaaatcagcggtttttcgacttcttttaccgtcagtttttggtcagacggcttgcctttttggttcagcagcttcagctgatccggtgctttgtttttgaaattccggtcatacgtactcggaaaatagacagcctcatcatgtttcaggccgttcagcttgacatggaagtatgttgacacatccgattcgctgatcatgtaaacagggggaacagtatctccttcctgatagcggacataggaaacatttattttgtctttcttatacgtaaagccgtgtgttttcagttcatggtcaatttttttcaaatgagtctgttcttttggattattgctgtaagataaatactccatctcataagcggactcttccgccccgacggtcgatttgtacatcgcgagcacgcccgtcgccgtaaacgctaccgcggaaataatgctgacgataaagaacaggcgggcattgtcttttaaacgataaacaagatcagaaacccaaatgacatttttcccgcgcagataaaaggttttccacttcttcagcgcgcgcagaatccagatgctgctttggctgaaaaagaaatacgtgccgatgacggtaagcagcaaaatgataaacggttgagtcccgtggacattgcctttaaggaccatgccgtacccgccgcacaggcaggcgatgccgaatatagacagaagcacggacggcttcggctccggcttgatcttgtcagtgccctttattaatttgatcaccgtatttgatctgacaaaaaggatcgtgaactgcgataaaaggaaaaataagagcaggaatccgccggccgtaatgccgagcgctttccaaggcatgtacagaggcagcgcctccatttctaaaatataagcgccgaccgtaaagaacgttttcgaaaaaatgaagcctccgataatcccggctgcgatcgacatgacgccgatgatcatgttttccgccgtaatgagctttctcagctgcaccggcgtaatgccctgcatcagcaggatgccgaattctttatttctcgatttcaaaaatgcgttaaccgaatacagaacaaataagaaagaaaaaacaaagatcatccattccgcggcggttaagccttttctggcgatgttattcaggtagccttcctttagtgccggatgaaacaggaacatcgcaaaggtaaagaaaatcaaaacggaaaaagcgctgcttaaaaagaaagcaagataggcccttttgtttctcgtgacgtttttataagcgaactgaagaaaggtcatttgcgtttccccccagcatagacagcacatcaagaatctgctcataaaagacttggcggttttccccgcggtaaatctcattaaacagttcgccgtcttttataaagatgacgcggcggcagtagcttgccgcaaccggatcgtgggtcaccatcaaagccgtgatatgatcatcctgattcaggctctgcatcgtttccatgacgtcttttgacgctttggaatcaaggtttcccgtcggttcatcggccagaatgagtgacggcttatgaatgaccgctcttgcgatggcggcccgctggcgctgtccgccggatacttcaaacgtccgtttgttgagcaggtcttcaattccgagctttgccgcgatgccgtgcagtttttcttccatgacagacggcgcctctttttcaagcgttaacggcagcatgatattttcaccgatcgtcagtgtgtccagaaggttgaaatcctgaaacacaaatccgagctgcttgcggcggaaatgagcgagctttgtccgcttcagccggtgcgggttttctccgtgaatcaggatatcgcctgaatccggccggtcgatcgttgaaatgatattcaaaagcgttgtttttccggagccggacggtcccatcaccgccgtgaacccgccttcttctattgaaaacgaaatttgttttaaagcttgataggacacttgtcctttataggttttatttatatgtttgacttcaagcatattcgccatgaaaatcctccttatggttttattcttgttggtctgggctgctttcatgtagtgccggggcatttaacataaaaatccccttgacataaatccatgttatcaaggggaaacagaacgagctatgttgttttcttaacgcagccttacatttttgtaagaaatgaaaatcggaccgatgtcccttcaccgggggacgagctgatgtccaccgtatgattgagcttgcccgtaatttctttgacgagatgaaggccgattcccgtagattcttggaaacgccgtccgttttcgccggtgtaataagggtcaaacacccgcttgatatcttgcgagggaatgccgacaccgtaatctttgacttcaagcaccgtcctgtcttcatcgcggaagacattcagctcaagtctgtcactcttgcctgccgaatacttgaccgcgtttgtgaccacttggccgatcgcaaatttgagccatttcgcatcggtgtaaatctgatgatcatcgcgaatatccattttcggatagacgcggtattgaataaaaaatcgtttatagctttgaatgaccgattggagaagctctgataaggaaaccgcttcaactttaaaatcccgctcaaacaggtcaagccttgaagaataaagaagcgtctccagcccgaattcaatctgccggacctcttttttgatttgttcaaagacgggctcatcctcttcctgaatgattaaattaatgaccgacagcggcgtttttacttggtgcacccattggttcatatacgtcacccgcgcgtccagcttggcttcggtctcatggagcttctggtgctgcatccgggtcagctccatctgcttttcatacagctctgaacaaaacactgaagaaccgagatacgggatgtccgtcccttcctgctccgagctgagccaatgatacacaccccggtctttgtaccagcgataggcaagatatcccgccaaaataagaagctgcacgcccaatatgtaaaacaggtgggaaaaagaatgaagacccgcaaaccagtaataaaagaagacaaacagcccttgaaggagaaaaagcagaatcagcacggcatgagaccggagaaacagcttcatgacagcgccctcagctggtagccttcgccccgcaccgattcaatggaaacaggcgcattcagctcccgcagtttttttctgagccgcgtgatatacacgttaagcgtattatcatcgacgaaaatgtcggtgtcccacgttttttccatgagccggtctcttcccgtcaccttttctccccgctccagcagcacttccaaaagcttgctttcttttttagaaagctcgcttttttcgtcctgaaagcgcagttcaaaccgttccacaaagagctgcacaccggcatattcaaccactttctctccctgcttggcggcgtacgctccgtatgccctgcggatctggcttttgattttcgccagcacaatatcgtaggaaaacggtttttcgatataatcatctccgccgttttcaatcgccatcacttgatccatttccccgcttctggcagagataaaaatgatcgggcttgtggagtgctggcggatctggcggcaccaataatagccgtcataagacggcagattgatatcaagcagcaccacatcaggcttttcccgcaaaaaaacatcaagaacagccgtgaaatccgcagcggccacggtttgatatccgtatttttcaaggtaattctgcaatagtccgcgaatgtcttcactgtcttccacaatcatgattttattcatgcaaccatcctccaaaaggatacggcttttcggagccctcattatttgatgcccccatcataatgctttcatcggttctctgcaacatgagaaagcgggcctttataaaagacccgcttctccctttctcaatgtaagatcgattatttctaattgacattgttatacttagatggcggactcggaaaggtaattttaaatcttgtgccaattcccggctgactatatatatcaatatttcccccatgtgccttgataatttgttgagcaatagccattcctaatccagtccctgagttatttgacgaagcgcttgtccctctgaaataccgatcaaataaacattcaaccgtctcttcgtccattcctatcccatcgtcttctattataatttgtatttcattgtcatgtaacacgtcctgatataatatgacctttattttagtgcccggaggattatgtttaatacaattagcaatcaagttttcaactgcgcgctttaggtacctttcatccatattaaaaagtatcttattgtgactggattctatagcgaatctcttattttctgactccggtagcaacttcattttttctaaagtgtcatgaattactttcactgcgtttttttcttcaagatggattggaagcgactcatttttcaattgaaaagttaagttgaaatcttcaatcagcttttccatatattcgacacgttcttccattattaaggaaaaatcacgcacttgctgattttcccactcatattcatttgaagataaaagaaccgtatatcccttaataaccgaaagaggggtttttaaatcatgtgagacaccggccatccactcttctcttgttttttccaacaactctctctcagccttattcctttgaagcgttgaggtaagttcagacagagcttgcattaattcttgataggtcttatatccagatttattatgtctatatttgcttgaatgaaacttccgatcataaggttcttcatatttttctttagacaaattctcaatccaagatacaataaacagcaggggagcacctagtttttttccgtaaaatattgcaattacaatccctgccatcataatagaaactatccacaagttattcacccaatagaaaaaagggttatttttttccatcggttttccccatacccatgttaaatcctgattgtttttcgtttcataccacgtagataattgataaccttttttggcaggatacatgtaatctgatattaactctccaagaatataatgcttaggtatatttttaggtttattaaaagaaaaaacctcatctccttgttcatctaaaatttgaatccacattcggttctctaataaatcttcttttgctttcgtatttattgaaaattgtttatctgcaacaactgtttggtcaacaattttttttaaggataagtgcggcgtttccattttattctgacctaagacgaggctgaaaaatatgatactgcccacaatgagcagaccccaaataaacatgagtaaaaaaagtctcgatacgaagtaaaatgctatcctatttctcagcttcaaaataaatcctcatctataggctctgcttcaaatatatagccctgtcctcgaaccgttttaatccatcttggtctgctcgggtcttcctctaatttttcacgtaatcgtcttacatgtaccattacagtactatctccgccataaaactccccccacacatctttataaatttggtgtttacttaaaatttgattgggatgttcgcagaaataaatcagaagtttcatttcctgagcagggcaatcgattcttgtcccgttaacaacaagtctgccggtattgggatctattttaaaatattcataatcgtatacctgttttagagggtaagaagaagagagttgagtcattctctttaattgggcttttacacgagctacaatttctagtggattaaatggtttagtaatatagtcatctcccccaaaactaaacccttgcaatttatctaaatctgttgtttttgccgttaagaagagtatcggcacatttgtatgcgagcgtattttgctgcataaggtgaagccatcagtgtccggaagcatgacatctaataaaataatatttggaagttcctgatcgattttcagaagggtttcgctccctgtcatagctgtggaaatattgctgaaaccttccttttcaaagcaagttattaataagtttaagatatgttcgtcatcatccaccatgaggattttgttctcttctaacgtcataagttaccctcctttttatttcttattttatatgagatcaatgacataaaggtcagaaaaggaaagaatttaactttcgttaagggttcagaatattcttttaaattttcgaccttgatattcaggtatcaatataactacatacagaaaataaaccagggatgtcgttaagtgaatgtttaggaagagtttcgtttgtgtttaaagaacatcgcttatgataaaagtgaggtgagagacaaatgaatgatcaaatagtggtaacacacgatctaactaaaaagtataaaaagcatacttcagttgatggattaaacttaaggattaggcgcggcgaaatttatggttttcttggaccgaatggtgctggtaaaacaacaaccatccgaatgttattaggtttagttaaaccaacaaaaggaaacatcgaaatctttggccaaaacctaaacaagaatcgtttgcagatattgcaaagaatcgggtcactggtagaatctccaacttattatggtaatttaacaggttacgaaaacttagaagctgttaggaggttacgaggacttccggaacaacgggtcaatgaagtattggaaactgtaaggttatctaaagtagcaaatcgactgactaaggagtattcccttggaatgaaacaacgtttgggaattgcagttgccctgttaagcagtcctgatttattaattctggatgaaccgacaaacggtttagatccatccggtatccaagaaataagagagctaattaaagaattgcctaaatcgggaatgagtgttattgtatccagccacttattgagtgaaatagatcaaatggctactcaagtggggattatcaacaatggaaggatgattttccaggactcgattgcaagtttacatcaaaaacgaaaaccactattaaaagtcggtgttagtgacgtaatcgaagcaaaaacaatactaaacaggaaaggattaaaggttgatttacaaaaaaatgatttgtggctgtctcaaacagaaccggaatttgtttcagaaatcaattccatacttattcattcagggctgtctgtatttcgacttgaagaaaagacacgatcgcttgaggatatttttttagaattaactggtacagagggaagtctatgaaaaagttattatgggcagatcaattaaaactgaaacgttcgtcgttattgattgtagtcttattggttcccttactcattatagcatatgagttggtaaatcttacttatcgatctgaatacgtggaaaaacaagctgaaatgttccatgctggatcaatgtggatgtatttactgtatgataacagtttgttatttggtctgggttttccattagccgcaacactttctgcgtcaataatagcaaatatagaacatcaagcaaacggatggaagcaaaccctttcttttcccgtatctagaatgcgaatttatgtaagtaaatttatttgcttagtagtcagtttatttatttcgtcaacaatcttcttgctcggcatggtactgctgggcaaactggtaggattcgaaggtagtgtaccttggggacttttgtttggagatagttacagcatgttagttacagtactgcctataatggcattccagatatggttatctatggtgtttagcaaccaagcattctcaattcttgtaggatcaatatcatctataatgggtttgtttttggcagctgctcaatcaacgagatggtttccgctggcttatcctagtcaatcttcgacagtcattctgcagtatgaaggtataggatataacccagatctttcatcttacctttgcattagccttttcttagggataattatattatttgtaggctctattcattttgctaaacgggatgctttgtaaaaaggaggcgaaatacttgaaaaacattttatttgtagaacgtttaaagcttaagcgatcaaagttatggatcatctatttattagggcctttgttaggtgtatccctggcatacacgaactttattaaaaactataacctttttatgaatcctggagacaatccctgggtagaggcttggacacaagttgccctatttatgggcccttttgtattgcctatcgtagtgggaattttcgccgcccttgtttgcaggggggaacatgtaggaggcggttggaaacagcttctagccttaccagtcaaacactcagatatctttctgggaaaatttctaacagtggtccgcatgatattcattagtatgttcattttaatcctcttatttattggattcggttatatgttaggcataagcgggagtcttcctttacttacaattctaggttatggaattagagggatcttagcttgtttaccattaattttattgcagcttattgtttcaattaggtctaaaacatttggcataccactcgctgttagcattgtttttacattaccggccattattattgccagtacaccattaggtcaagtatatccatggacacagcctatgttagcaatgtcacccgaagatgaatcaccgattcaatcaaacttcctattttactcaattatggtaataacatgtctcggtctcctggtttacggaataagaaattttactaaacgagaccttacgtagggtatatgcggtataaacttatgagaattcgagacaaggtaataatgaaatcactgcgaaagacaaagacatgacttatagattattttaacaaaaaagaaagttaccgacgtcatcgataaagaaaagaataataacgaattctagttttcataactatagtaaacgagggggcaagctgtatacaaatcgcttggattgaaagagcctgtaaagatgaacaggttgatttgattgtgatactttggtgaaacgcgagaaggacataaacggaaagacgaaagcactcacgatgttgtgagtgcttttcatcagccgacctgctgttttacggctttaccggctgatccgaactctctcattttgcttcgcactgtctcttccacggcctcaatgccgggtgtcatgtagccgcgcggttcgtacagatcgccgtttttctgaaacatgcggcgtgtttcttctgtccaggcgaccatacattccgtgttgatattgattttcgcgtggccgagcgtgatggcttttttgatctgttcctgcggaatcccggatgctccgtgaagaacgagaggaatatcagtcatgcgggagatagcctccatttctttaaatccgagattcggttcaccttgatatttgccgtggacggagccgagggcggcggccagcgcgtcgatattggtttctttgacgatccgctcacattcggcgacatcggcatagcggaccccgccgaccagcccgtcttccatgccgccgaccgtgccgacttctgcttctactgagacgccgtgctgagcggcataatcggcgacttcttttgtcatcgcgatgttctcatcaatcggatgatgggagccgtcaatcatcactgagctgaatccggcgtcaatggcctgtctgcagcgttccgcactgcttccgtgatcaagatggagcacgacgggaacggtaatcgccatttcttccattaacgcgccgaccatggcggaaatcgttttaaatccgcctaaatagtcgaccagacgatcggaagccgcggcgatgaccggcgattgctccttttgcgccgcttgcagaatcgccttcgtccattggaggccgttgatattaaattggccgactgcataatgctcccgtttcgcttctgcaagaagatgtttcatggtgacaaaagccatgttcacgcctccttcatgaagtattttgatacgacggcttccgttgtttcctttgccgttttgatcgtttcctccgcagtcagcttataatattcaggtctgaacagctctacggagacaacatcattgaatccgatttcttttaacgctgacagatgggcgtctaagtcaatcgcaccctgtccaggccagacgcggtcttcatctgttaaaaagccgatcggaaagtcttctgtatcgtcgatatgatagatgaaaattttctttccgtccgcctgcttcaagctctcaatattggagcccatcgcgtggaaatggaagctgtcaaacaccagtccgacattatcgcggccgacagcgttcacgatgtcatacgcctgttcaaatgtattgaccgtacattgcgggtggccgacaaattcaagggcaatgtttacgccgtacggctccgcgatgtccgaaagctcagtcagcacctctatgctgctctttttgatctcttctttcaagattttccgctctgtcacaagcggcacggccaccacatatttcacgccgagcgtcctgcaggtttccatcatgcttttgaattccgaaatgatctccctataccccttctcatcacggttgttgaagaaaaccagtgcgttcagggcaagcggtttaatgtgatgggttcgaaaatattccgccagatcggccagtgaatggtcttttaagtattccggcagcttatccattgtgcggatttcaatataatcatagccgtgcttttcgcacagttctaaatcctgtttcaggtttgaattctccagcgtagtcgcttcattaaagcaaagtttcatgtcagcctctcccatccgcgttttcgatatgaagggagtccggcaggagggcttgtttgccccgctccgccgaactccatactcagcttatgccatgcctaattcttcctttaatttcttaagcgtggtccggcttgattcatccgctctttcaccgacccaagcaaaaacagcgttcgtcgcaattccgtcgaatttcatctctctcatctttctgaaaatcgtctcaaaatcaacctcgccttgcccgatgtccaaatgttggtgaaccgttactttcgcgtcaggcgggttgacgatgtagcgcaggccatgcgccgctttatgattaaaagtatctgcaaataaaacatgtgtgaggcggtcgccggcttcatcaaacatggtcgcaatatcgccttttccgtcatcatagaagaacgtatgcgcagtcgagtagacaagattgatccaatccttgtcaagcgcgcggatcatatccatcgcacctttgtgcgtttcgataaaatcgtatggatgagcctgcagattgagtttaacgccttctttttcaaagacgggcagcagttcatccatggatttgatgaatttttcttcacttgtcaaaggatcatattttgaaccgctgaattcactgttcatcaaatccacttcaagttcaaccgcaatttcgatcgcccgtttccagttgcgcacggcggcctgacgacggtcttcatcaggacccgcccagtggtaaagcggaagaagagaggacagcttcacacctgtatcctttaaaaggcgcttcaattgtttgatttttgctgaatcgactttcggatatttgtagaaaggacaaaaatcctcgcgcggggacagttcgatatattcgtatccgagctccgccgttttatagaccatttcttctaacgttaaatcatcgcggtacatggatggatctaaggccagtttcatttctttcactcccgatctattatttgttcacagtcgtaaatgattggtagaatgccggtttctcttgcagcgccacaggctctttctgcccggattcctgagcttttacgcacgcgtcagttgtcactgcggcaatataaccgtcccatgccgtcggaccgctgacttcgccttttttccggatcgaatcaatgaagtcttgaatttccacatcatacgcagccacaaatcggcgctgccaatccatcaggatatcggtgctgaatttcccttcttttctcaaactgatgcttgacggttccggaagcttgatgacgccgtcttccccgacgatctcacattgaatgtcatagccgtatttacagttcacgtagatttcggcattgatgacgatgccgccttttgtttcaatgatgaccatctgcggatctttcagatgcggcagcgcattttttgatttcttcggatagatgacctgtacggattcatagtcgtcattgacgagccagtggaggacatcaatttcatgaacgagcgtatcgacgacggccatgtccgttgaataattcgatgcgactgtcgggttgcggtgcgcacagtgaatcatcagcggctcgccgaccacgcggttgtcgatcgcttctttcagctgaacgtaaccgctgtcatatctgcgcataaaacctacctgcaccaatcgttttcccgtcttcatttcttcctcgacaatgcgcatacagccttctgccgttgtcgcaagcggcttttcacaaaacacgtgcttgccgtgctgaatcgctttcaaaacgctggactcgtgagccgggccccagcttgtcactaagacggcatccacattttcagcagcgaggaggctgtcgtcatcaggataaacggaggcgttcaaattgaaatcctgaacggtctgctgcgcggcctcctgattcacatctgtgacagcggtaatttccgcacccgacagcttatttgtgatgcggttgatgtgctcttttccgatagcaccggttccgataacacctatacgtaaattcattgatcgccactccttctgataatcaaataatggttctcgtctttcttttcccgctgccgtcctgaggagcgccgtaaagttcctcctgtatctgttcaagcgacttgccggacgtattcggcgcgaagacaagcccgatgatcatactggccgtcacacatatgagcagaataccggccataaaaccgatgccgaattgtgacatgatgaccggcacaaataaactccaaatgccgattgaaatacggacgagaaagaacatgagcccttgtgctgacgctctgtattctgtcgggaacagctcgcttgcccacagctggtagttcgcctgctggccggctccgttattgatgccgatcgctaaaacaaacaaaagcagcatcgggagcccctgaaacggcagtaaaaacagcgaccagccgacaacggccataaaggcacagattccgaacaccgttttccgatatttatctgcaaaaggcatgaagatacaggcgacgccgagcccggtgaagataaacagggccatctgcagaatgttggccgtatttgcggatacgccgccgacctgctggtagatgtacggcatgaagaatcccatgacgcccgctgcgagattccatacgagaaacacacccattaaaaacaaaatgttcttgaaaaatttcggctgaagcaggtcaaaataagatgtttttttcacggcggcaggccgctcttcactgtttttccaggcatccgactcaggtaaacgctttcttatcacatatgtgatcagggcgatcaccaatagatgcgcaaagacaattttatttcctaaaagcccgaggtcaccgaccaaaacggataacagcagaaccacaacggctcctgcggcccacgccacctgcgccactccgcaatgcctcgcccggtttttctcgggggcgttttccgcgataatggtccatgaagccgtaatatccgcgcctacagaaatcccgataatcatgtatccgcataacagcatgggaaagttgaatccaaacaaaaccaaacaaattcctaaggcgtagacgagcatactgtttgtgtatacagcttttcggccgactttatcagccaaatacccgccgagcagcgctccgacggccgctgatatcgcgtttgcactgaaggcgccgagcaatccgatctgactgtcggacagctttaaatagctgacccacatagataaacccgctgatcctgccacgatggaacctgcatcaatgtaatttgctaatgctgcggcgatggtccttttgctgaaagctgattccgccttggcactattcatataagtccccctctaatttgcaggatcaagcagttcactgtcgatgtactttctcgcaatcagcgcgtactcaagcggattggcgactgccgggtcttgttcggcttcgatgacgatccagcctgaataatcatgacggacgagcgatcggtacacttcggtaaaatcgatgcatccgtctccgggaaccgtaaaaatgccctgtaaaaacgactgcctgaatgacttgccttcctgtctgcaccgctccataatgtcaaaccgcgcgtccttgaaatgaacgtgtctgatccgatccatatgcttgttgagaatcgtcatatagtctccgtccgagatataggcatggccggtatcataaagtaaatggacataccgcgggtccgttccatccatcagccggtcaacttcttccgccgtctggacgcctgtgccgagatgatgatgaaaaaccatgtccagcccgtattcgtcagcgattttcccgagacggttcaagccttggcacagcgtatcccattcttcatctgagaaatgcggtttttccttaaatacatcaatgtccaagccctgaacgctgtacgtctgttcagaaacgatggcgacatccgctccgactttctgcaaataatcacagtgttctgtaaattgttcagccgttttttcaataccgtcatgtatgataaagctgctgaaccatttccccgcaatccgcaagttccggagagccagctctttattgaggacggcaggttcagggaaaaaccctcccacttccgtaccttgaaagccggcgacaacaatatcgcttaacaaatgctgcagcgtattcccggctccgatttccggcatatcgtcattgcgccacccaatgggagcgatgccccacagaatatcttgtttgcccatcgtgatgcctcccctctagtactgctttgcagacttcagcttcgtctctttcgcttcgtatgcccgctgaacgcttttctgctccgacacttccgccacgccgacatgccaccagctgtcatagccgtccgtcatcgttttcggcagaactttcatttcaattaaagtggatacgtcttgcgttttcgcatcttcaagcgccgctttcagttcttcaaccgtattggctctgtatgttttagcgccgtagccctctgccaccttcgcgtaatcaacgtttaaaatctgattgtcctctgtgcggaactcgcaaaaataactgccgctcccgtgatccatctgcagattgttgatacagccgaatccggagttgtcaaagagcaggacattgatttttttgttatattgaagcgcggtaatcagctctgagtgcagcatcagaaagcttccgtcgccgacgagtgaatagacttctttgtcgggatgagccagcttgaggccgagcgtgcctgatacttcataccccatgcaggaatagccgtactcgaggtggtacgtattcgggacgttggaatgccacagccgctgcaaatctcccggaagagatcccgccgaactgatgacgacgctgtcttcaggaatcgtgtcattgatggtcaacagcgccgttgtctgcggcagctcagtcccgagcgcgtcggcatactcgtttaacacatcctgtgagaaatggtttttaatttccggtttgaacgcgtcacgtgtaaaagtgaccttgccgagccggtcccgttcagcaagccattcatctttccagtctttaatcgccgtgccgaatgcacttttatatccatctaataagccgtgcagcctgccgagcgtcactttcgcatcggctacgacctgaaacgcgtcaagcttgtaagcctgcatgcggctgacgttgatattcaaaaattttgctttgtcaaaatcaaacgccgttttcgaggatgtcgcaaagtccgtgtaccgtgtgccgacaccgatgatcagatcagcctggcgggcggctttgtttgcggcgagggtgcccgtgatgcccatgccgcccagattgttggcgaaatcggcttcaaccgttgacttgccggcctgcgtttcgacaagcggaatgccgtatgtttcagaaagcgcgattaattcctcacgcgcgccggagtacttcgcgccgccgcccactaaaatgacgggacggctgctctccttaattctttccgcggcgcctttcagttcacgctcgctcggctgcatccggtcaatgtaatgaacgcgtttttcaaagaagctttcatcaaaatcaaatgcttctccctctacatcctgagatatgcagatggtcgccgggcccgcttttgccggatctgtcatcacttcaaatgcccggattaagctgctcatcagctgctcgggtcgggtaatgcggtcccaatagcgggacacgggctttaacgcatcgtttgtcgtgacggcggcactgtattcctgctccacctgctgaagcaccgggtcaggctgcctcgtcgcaaaggtatcggccggaagcagcagcaccgggatatgattggccagcgccgtacccgcggcagccgtcaagttagcggcacccggaccgaccgatgtcgataccgcgtaaatttttcttctcagcatctgcttgctgtatgccatcgcggcatgcgccatgccttgttcgtttttgccttgatagactttcaggtgcccggcgtcctgctcaagcgcctgcccgatccccaacacatttccgtggccgaaaatcgtgaagatgccctcaacgaacggctcttcttttccgtcaacatgaatgtactgccggttcaagaattgaatcagcgcttgtgctgtcgttaagcgaattgtcttacccacaaacgatcccaccttttatacgttctatttaccgttaagactgtgctgcgcttcaatcagttcgataatttcaccggcagccggcattgcttctgaggagctgtgtttgctgacgacgatggaagcggaagcgctcccgtattttaaagccgtttcaatatcccggccgctgacaagtccgtagatgaaggctgacgcataggaatcacccgctccgaaggtcttcagcacctttgttttataggcatgcgcccggaaaacttctcccgatctgctgtatgcgtatgatccgtcaacgccgtgcttaatgacgacaaggtcagcggagtgcgcaaacaaatggcggacggtttcatcgttacctccgccgctgcggttttccattacgtcaaattcgtcacgcgtaccgatgacgatatcggattgttccgccaccagcgtgtagtacacggctgtttcttctgccgattgccatgtatacggacggtagtcgagctcaaacacgacttttacgtcatgtttttttgcgatatgcaccgcttttaagacggcttcgcgcgacgggcttttcgcaagcgccgtacctgatacgagcagcattttcgcgtttgcgatgtagccttcattgacttcgtacggctcaagatacaaatccgccacgtcatcccggtacatcagaatgctgcactcttcaggactgagaatttccgtaaaagcgagcccggctttgcgcccttctctgtcaacggtcatttgtgacgtatcaacgccctttccctgcatataagaaacgatgaatctgccgtgctgatcgtccgggattttgccgataaaaccggcttttaatccgagcttggcgctgccgatcgcaatatttgccggggagcctccgacatatttagaaaacgtcatcgtttcttccatcggccggttgtattccgccgcgttcaaatcaatacacgcgcgcccgatcgcgacaatatcaaactctttttcttcattaaatgtatatttcatcgttatctgccactcctcacttgttagcgttccaggatccattcatgggccggatcattatgaaacttccattttcgtgtcggtcccgccattacattcaggtagtaagaggtatacccgtccggaacaccaaccgggtgatagcccgccggcacgatgacaacgttttcattttctgcggtcatcgtctcgtcaatcgagcggtcgtccgtgtacacacgctggaagacaaacccctgcggcgggtccgtttcatggtaataggtttcttctaaaaaggattcagccggcagattgtcttggtcatgtttatgaggcgggtagctcgaccagttgccgctgtccgtgtaaacttcaacaacgagaaggctgtttgccgatggatctgaatcggggagaatattatgaacggttcgtttgtttgccagcttgccgcgatgttccacaccgttgtcttccgctttaatcagctttgtcggaagctggtgttcggacggagaatagcacagcgcgaccctcgccccgctgacggctgtgattccaaaagagcggtcattggacacataaacgctgtccgtcggttttctttcaaatacgctttcacgggtgccgatgctttcaaatgtctgatcataatcagtgacggtgatttttcccgttaccgcaacgatgcagcactccgtctttttcaaatcttctgtatatgcggaaccgggagtgaggtcaacgactttgaatccgacgtatttgaggtctgaattggctgaagtgacgtcatgtatgatgttcacgccttgagacatctcatcggcctgcggtttgcgcagcaaatgactcatgtttattcctccttaattgatggtaaaagaaaacccggacggaatctcgaagccgtccgggccggctgtcagatcaattgaagtcaggagacgggtatcgtgccgtcacgacttttttacgtgtatagaagtcgacgctgtcttttccgtttgcgtgcaatgtgccgaagaaagaagacttccagcctgagaacgggaagaatgccatcggcgccggcacgccaaggttgatgccgagcatccccgcgtcaatattttcacggaagtagcggatcgcgttcgcatttgaagtgaacagacacgcgccgttcgcaaattcagactggttggcgatgtccaccgcttcttttaagtttttcacgcggatgaccgacagaacgggcgcaaagatttcatctttccagatcgtcatatccgtcgtcacgttgtcaaaaatcgtcggtccgacgaaatagccgtcttccgttgcgttttcacgtccgtcacaaagaagtctcgctccttcttcgatgcctttttcaatatagctgtgcgtgcgttttttgttgtcctcgcggatgaccgggcctaagaacacgccgtcatccagtccgtttccaatcttgatgtccgctgctttttcctgtaatttcgccataaactcatcggcgattccctcttcaaccgtcacaaccgcgcatgccatgcaacgctctcctgccgaaccgaatgccgcgccgataatgtttgtcaccgtatcttcaaggtgggcgtcatttaacacgatcgtatggtttttcgcgcccgttaacgcctgcacgcgtttcaaatgttcgctgccttttttgaaaacatactcgccgacaggttttgaaccgacgaatgagatggctttaatatccggatgttcaagaacgccgtttacgacgtcatgcgcgccgtgcacgacattgaagacgcccttcggcagaccggcctgttcaaacagctctgccagtttttccgttaacagcggcgtgcgctcagacggcttcagaatgaacgtgtttcctaatgaaatcgccatcgggaacatccagcacggaaccatcatcgggaagttgaacggtgcgataccgccgaccaccccgatcggatagcggtagttcgccgcctctacatccgtcgcgatggaggcgagtgaatcgcccatcatgagtgacggcgcgcccgctgcgaattcgacgttttcaattccgcgccccacttcaccgagtgcttccgtcgtgtttttaccgttttccaaagtgatcagacgggcaagctcttctttgttctgctggagaagctgctgatagttaaatagaattctcgcacggcgcggcactgccgtctttgaccatgtttgaaacgcctctgacgctgagcggacggcgtattccacatcctcccgcgtagaaatcggaacctggcacatcacttcttttgtagccggattgacaacgtcttcatattgatctgtcttactttcaacccattcaccattgatgtagtttttcagttttctgatctctgccattctcattgcctccttaaatagtaaacatcctgttcagctggataataacggatgaatatattcatcttttacatataaaagacatgaattaaacgcttacaaatgctaaaatgatggtgactcccaatcttcccatgtaaaagttggtcatgtaccggaaaaagcaaacggttacatctttcacttttgattttacaggttatgttttggtcatttcttggttacattgtaagcccaacacatcttcaagtcaatctaaaaaatcaaaattttttcattatttttatcatactttttttgatcgggaaaacaggaacttggagaaccgtgtcgaatcggaggggatgatccctcttttttatcatttgttaagtaactattgattaacttctggtgtttattatatattttaattactttaagaattctagaaggagtttttttatgaaactgatgcggattcaggagatggaagaatacattctcaaacatggagccacttcgctggatgagctgtgcgaggtattcaacgtctctaaaaacacggtcagacgcgatattaataagcttgcggaaaaaggggttatcaaaaaggtatacggcggcgtgacgtcagccgaaaaatctgtgctcgtcccttttgaaaaccgcaccattcaacatcaggatgaaaaaatcaaaatcgcccgctatgcgtcacggtttatcgaggatcacgatcttgtgtttattgattccggcacgacgaccaaatcgatgctggagacgcttgatcccgataagaatgtaacggttttgacgaacagccttgatattattaacgcggcttcatccatgaaaaatatcgacctgatcatcatcggcaataactacaaacggaagacaaggtcgtttgtcggcattgatgatacgagcacactcaataaatacaacattaacaaggcgttcatgtccgctaccgggacaacgatcacccacggcctgacgaactccgacttactggaatacgaggtgaaaaagagaatttccgaaaaggcgaacgaagtgtatctgcttgcggatcattccaaattcggcaaatccacgcttttgacatacgcgcctttcgaccggcttcacagcattgtcacttctcagcagctcgatgaggaatatacgaagtattgccaagagcatcaaatcgacattcacttggcatagcgttatagttaatagagaacgctgccgtatttttccggcagccgctatgatatccaattttttcagggggcgaaaacatgagcaaagtaacaatcggcaaaactgacctaaaggtatttccgatcggtttgggaacaaatgcggtcggcggacacaatctctatccgaatctgaatgaagaaactggaaaagaattggtccgggaagcgattaaaagcggcgttaccatgttagataccgcctatatttacggtgtgggccgttctgaagaattaatcggcgaggtgctgaaagaatgcaaccgcgaggatgtcttcatcgccacaaaagccgctcacagaaaagaaggcgatgactttgttttcgacaattcaccggcctttttgaaacaatcggtcgaagacagcctgaaacgcctgcagactgattacatcgatttattctacatccatttcccggatgagcacacgccgaaggacgaagccgttcaagcgttgaatgagctgaaaaaagaaggaaaaatccgttccatcggcgtatccaatttctctttggaacagctgaaagaagccaataaagacggcttagtcgacgtgattcaaggagaatacaacctgctgaaccgtgaggcggaaaagactttcttcccttatacgacagaacacggcatctcattcattccgtacttcccgctcgtatccggactgctggccggcaaatacgacgagaacacaaccttccctgaaggcgacctgcgcaatgatcaggcgcatttccaaggggagcagtttaaagagaacatcaaaaaagtcaaccagctcaaaccgattgccgaaaagcacaatgccgatacggcgcatatcgtgcttgcctggtacttggcgagacctgaaatcgatatcctgattccgggcgccaaacgcgcagatcaattaaaagacaacatgaaagcagcctccattacgctatctgctgaagagatcgcgtttatcgacaagctgttttcctaagaaaaaaaacacgccttttaaaaggggcgtgtttttttatgtttatatttttctcttcggggaatgaaatagttatctaaataaactattatgcgttccaaaagatgaggaggatcatctgtgaagaaaaacaccaaaaaatacctgatttactttttcggagcattaggcgggctgctttacggctatgataccggtgtgatttcaggggctttgttatttattaacaatgatattcctttaaacacgctgaccgagggattggtcgtcagcatgctgctgctcggtgcgattttcgggtccgcattaagcgggacatgctctgaccgatggggccggagaaaagtggttttcgtcctttcactcatttttattatcggcgcgcttgcctgtgcggcttcgcaaaccgtcactatgctgattatctcccgtgtcattctcgggttagccgtcgggggctcaacggcgctggttcccgtttatctatctgagatggcgccgacaaaaatacgcggaacgctcggcacattgaataacttaatgattgtaaccggaattttactcgcatatatcgtgaattacatattcaccccgtttgaagcttggcgctggatggtcggtctcgccgcagtaccggcggcgcttttattaatcggaatcgcatttatgccggaatctccgagatggctcgtcaaacgcggccgtgagcaggaagccagacaagtcatggaaatgacccacgacaaagaggatatcgccgttgaattggcggaaatgaaacaaggagaagccgagaaaaaagaatctacgctcggcttgctgaaagccaaatggatccgccctatgctgctgatcgggatcggcctcgccatcttccagcaggcggtcggtatcaacacggtgatttactatgcgccgaccatctttacaaaggcaggactcggcacttcggcgtccgttctcggcacgatgggcatcggtgtcttaaacgtcatcatgtgtatcaccgccatgatcttaatcgaccggatcggccggaaaaaactgctgatgtggggaagtgtcggcattaccttgagcctggcgtcactatcagccattctccttctggccggcctgtcagcttcaacagcatggctgaccgtgctgtttctcggcatctatatcgtcttctaccaggcgacatggggtcccgtcgtatgggttctgatgccggagctgttcccgtcaaacgcacgcggagccgcaaccggatttacgacattgattctgtcggcaaccaacctgatcgtttcactggtattcccgcttatgctgagcgccatgggcatcggctgggtattcggaatattctcagtcatttgcctctcatccttcttcttcgccgcttacatcgttcctgaaacgaagggcagaagtttagaagaaatcgaaacgcacttgaaaaaacggttctccttaaagaagcgcagcaaacaaaatcaaattcttaaacagcgcacactgtaataaaaaaaggaatcgcccccgctgggcgattcctttttggcgtcataccataactttgcaaatgtcattcgtaaactcgaccggatcatggatcggcagcccttcaatcagaagcgcctgattgtacagcaggtttgtgtataatgccagcttttcccgatcttgtccgtgcgcgttctttaaggtctcaaacacttcgtgattcgggttgatttccagcactttttccgctttgacctgctggctgtcaggcatagcattcaacactttttccatttcgatcgtcacttcgccgtctgtcgcaaagcataccggatgggattttaaacgtttcgacgctctgacgttctttactttatccgcaagaatctctttcatgctttcgaacaggtctttatattcgttctcttcggcttcagtctgcttttcatcctcatcactgtcgatgcctaagtctgcgcttgatacggatttgaactctttttcctcatagcttgtcagcattttgatcgcgaattcatcaatatcttccgtgaagtataaaatttcgtagcctttgtccgccaccatttcagtttgcggcagcttttcaatccgctcatatgaatcgccggacgcgtaatagatatatttttgatcctcaggcattctggacacatattcgtccagagtgacgagctttttctccttagatgaatagaagagaagcagatcttttaagacatctttattcgcgccgaaatcattatagacgccgaatttcagctgtctgccgaaagattcatagaaagattcgtatttttctcttttgttcttcagcaggctcttcagctcggctttgatttttttattgatgtttttcgcaatcagcttcagctggcggtcgtgctgcagcatctctctggaaatgttcagcgacagatcctcagaatccaccatgccttttacaaagctgaaatggtccggaagcaggtcggcacatttgttcatgatcagcacgccgttggaatacagctccaatcctttttcgaattccttcgtataatagtcaaacggcatgttttccggaataaacaaaatcgaattgtagcgcaccgctccatcgacgctgatatgcacatgggtcagcggtttatcaaaaccgtaatgcttctcggcgtaaaaagcctcgtaatcctcatccgtcagctcgcttttgttttttctccagatcggcaccatgctgttgaccgtctgttcttcctgaacttcttcaaattcgttctcgctgccctctttcggcttgttgaccgtctcttccattttgatcgggtagcggataaaatcagagtactttttcacgatcgctttgatgcggtagttttctaaaaactcatcatagctttcatcttctgtgttttcttttatttgcagggtgatttccgtaccgacggtttccttgtcacacggcgcgatcgtgtagccggcagccccttccgactcccatacatgcgcttcgtcactgccgagcgccttacttttcaccgtgactttatcagccaccataaacgccgcataaaacccgacgccgaactggccgataatgtcatggccgtctttcgagtcattttcttgcttgaaagcgagtgaaccgcttttcgcaatcgtgccgagatgctgttcaagctcgtcttttgtcatcccgataccggtgtctgtgacggtgagcgttctcgcttctttgtccgccgtcacttttatgtagtaattgtcttgatcaaacgttaatgaatcatcggttaacgccttgtaatagattttgtcaatcgcatcgctcgcgttggaaattaactcgcggagaaaaatttccttctgcgtgtaaatggagttaatcatcatgtccagcaatcgcttggattctgctttaaacttttttttccgcacttcagatctctcctttaattatgctttgatgttatgtaaaatcttttcagcatctatttatcatatacagtgacaattgtcaactaggattagcagatgcatatattgtaaatttaacatgttaatggattgatttcacccattttatcaataaaaaagagagaatgttgatcatcctctcctctctgcttctttccggcggccgaattccttcttcatccatatgtatgacgggtagaaaaacaaactaaataagataagagatcccaagtttcgcaaagactcatgcagaacatttcttacagtgagaggaaatatgatgtcctgaaatagaatagagataacggtgtaaatcacaaatcccataggaacaatggcataacaataaaacgctatctccttcttatgctgtatcttcaaaatatgtaaacctcccaatgatgtatatacataatattaacatatttaataggtatttagaaacagacctccgtatgtttatccccctattcagcgggaacagatataaaaaaggaggaatcgcaatatgggaagattaacagacaaaaccgcaatcatcacaggggccgcgacaggcatcggacaagcgacggcacgggttttcgccgatgaaggcgcccgcgtgatctgcggtgacatcaatgaaagcgaactgtatgaaaccgtcagcgccatcagaaaaaacggcggagaagcagaagcctttcaccttgatgtatcagacgaagaaaacgtaaagtcttttgcggacggcattcagcaaaagtacggaacaattgatattctgttcaacaatgccggtgttgaccaagagggcggaaaagtccatgaatacccggtcgacctgtttgaccggatcatcgccgtcgatctgcgcggcacatttctttgcagcaaatacctgattccgctcatgctcgaaaaaggaggctccatcatcaacacctcctccatgtccggacgggccgcagaccttgaccgctcaggctataacgccgcaaaaggcggaatcacgaacctgacgagagcgatggccattgattacgccagaagcggaatccgcgtcaattccttatcgccggggacgattgaaacgccgctcattgataaattggcaggcacgacagaagacgaaatgggcgaagcgttccgtgaagccaacaaatggatcacgccgctcggccggctcggaaaaccggaagaaatggcagccgtcgcgctcttcctcgcttcagacgacagttcttacgtcacgggagaagacatcaccgcagacggcggcatcatggcatacacttggccgggaaaaatgctgattgataagaagtggaaggaagagacggagtgacggtgaaaaaaaaacaagccagtgcaaaaatactggctgaacaagctgagggcgggttacttaaaccagcccttttcctttgatcgggtaatggcttcaattcgatttttcacttctaatttatccaggatcatcgaaacgtaattgcggactgtgccgcttttgatgctgagggcgtttgcgatttctttcgtgttttttccgtctgcgacaagctcgagcacctctttttcccgttcggtcagcgggttttcttcactatagatgtcctccattaattcaggtgcgtagacgcgtcttcctttcatgacgctgcggatggcgctgacgagctcatcgctcgggctgtccttgagcatgtacccgctgacgcctgcttttagcgcccgctgaaaatagccggagcgggcaaaggtcgtcaaaatgatgattttcacaccgctgtccttgagttcttctgccgcttcaagacctgatttcccgggcatttcgatatccatcagacagatgtcgggcgcatgtttttccacgaaatcgatggcatcctggccgcttgtgcctttaccgacaaccgtcatatcctcttctaaattcaacagcgaaccgagtgcgccgagcagcatttgctgatcctcggcaatgaagatgttgatcatctgctaccatccttttcttttgattttgaatcattcgggattctcatggtcagctttgttccggcggctgtatcgatggctaaactgccgtttgcgaattcaagacgttccctcattccaagcaggccgtgcccctttgaaaaaaagcggtcttctttgcattgaaagctgccgtcatcttctaccgtaatgacaacctctttccaaagctgctgaatggtgatgcggcatactttggcgccgctgtgtttcacgacattggtgacggcttctttaatgcacatgctgacgatgttttcgttcagcagagagatatgttttggcgcttctttttcttcatacacaaattcaattcctgccgcttcaagaatttgccgaacattgccgagctcatccttcaatcggatgcctttcatcgatgagacgatttgtctgacctcatttaaggaggtgcgggccgtctgctgcacgcttttcagctcagtgcgggcctgttcagggtccttatatatcagctttcgggcgaggtcgcttttcagcccgattaaggagagcttttgtccaagtgtatcgtgaaggtcccgggcgatgcgctgcctttcttccagcttcacaagatcggcgattcgctcatttgcatattctaatttctcctcaaggcgctcccgtgcctttctgcttcgaatgctgagcgggagcaggatggcactgatcagtgtaatgacgataaacggaatttgtgtcaaaaaccacccttttttcagaacaaggctgaagttgacggcaaccgccgcactgatgatatgaatgtaatataagatgtaaaaaggaactttgtctcggatatggccgatgaagtaggcgataaagaaggcgaagtaaatatagctgaacagcataactgagccggtcgaaatgccgatcagaagaagcgcccataagtaaagcggccagccttttgcaacaaatgcgaagcggtatgcgccaaagaaaacaagtgtgaaaatgatgccggccacgataacaaaggtagaagagcttttaaaaataaaataaaaaggcaagatgaaaaaaatcgtccatatataaggagaaatcccgttcagtttttgaaatttaaaatacttcttcatctttgttccaccttctgctgcttgtgtctaccatcactttatcaaaacaccgccttcattgcatcctcacgcatgaagagaaggccctttctgataagagaaagagccgcgcgccatatcaggcatttttctttaaaggttctttcggtaccggatggggcgccggttttttccgcgcctcccgaaaggtgacaaattgcttttcgtcctcatcccacagacggaatttcatggattcaagacttgttttaagcgtaatggtcggtacgttttttaaaggctcgtgcccctcatgagcggcttccagcttgtagttcggcactttcgggcttaagtggtggacatgatggtagccgatattgcctgtcagccattgcaaaagcttcggaagcttgtaaaaggagcttccttctaccgcggcctgcacatagtcccaatgctcatcggcttcaaaataagaatcctcaaacgtgtgctgaacataaaagagccagacgccgattgaccccgaaataaggaaaatcggaccttgaacaagcaaaaagttttcccagccgacaagcaggcacgtcgcagcagccaataagacaatcgccgcgttcgtgaaataggtgttccagcgctccttgcggcgggcgccttttacattgaaacggtttttaatcagaaatacgtaaatcgggccgagaataaacataataaacggattgcgataaagtctgtagcgtacttttgtccaggctgaggcttcgttgtattccttgacggtcatcatccaaatatcgccggtgccccgtttatctaggttgctgctcgtcgcatgatgaatggagtggctgcgctgccattgaaggaacggaaacagtgtcagcacacctgaaataaacccgaacagccggttcagcttcttttgtttgaaaaaggattggtggcagcagtcgtggaaaataataaagattcttgtcaaaaatcccgctgctataacagtaaaggcgagggtcagaagataggagacattgaggctgaagtaagcaagaaaccaaagggcaaaaaacggcacaaacgtgttgaaaagctgattgacactatgctttgtatcggcaccggaaaatgcagcaacctgcttttttaaagatgcttgtttttgagttgcggcgtgattggtcatgaatgtcatatccccttttttttattatgattccaagtataccgaggcgctcgcggcggttgtagtagcagccatcatgccccgaatatgacatttgtcatgtttggcggcagaatgctgaacaggcggcatatggaaggtatcttttttatgagggataaagccggacacttcatatcggcacttctcaatgaaaacagcaaaaaagaacccggcctgttttcggctgagttctttttcatcatccttacagcaaaatcacccgatacttcttcacatccaaaaactgcagaaactcccgggccagcatgtccggcgcgtggtcttttccttcatgaagacgatattgaatcaaaccggcgagcatggatgcgacataatatgcatagagttttttgcccgcctgaatgtgcaggggctgatgaagataaaacgattgcagcgctctgaacatttccggaatgacgtcaggcactccggagccctctctcagaaaatggacgagcggcaggccgtccgacagtgccgaaaagagacggacgagcgcggcttccgcttcttccatggagcaatcggcaggctctccttttaccgtcaataatccgatcagatcccggcatgattgatggatgatcgttttcagcaacgcttctttgttggcgtaatggtcataaaaagtggcgcggcggaggttgctttgacgggcaatatcggaaatcgtaattgccgcgtactcttttttttccgccattaagccgatcatggcttcttgcaaggcctgcctcgttcgggtcacccggcggtcggcgggctttttttcttcttgttccggcacccggcggccaaacagccagtaaaaccgtttttgagaaatcaaatcccacacctgtccgctgatcgcttccggggatgccccgggctcctcattcagccagtacaacacaatggcatacgtgtataaagcgcggtaatgaatgtacatatcctgttcagtcggtgagaaatccgcattgaccggtgacagcagcacatcatgccggaacacatcttttaaaaaagcatgaaagtgaaaatacggcattttattgcgatccatcatcgtttgaaaaaacacccgatgccgatcaacaaaagacagggtcggatgcactttttgccatccgccatgtaaatgaagcacatctttatgcttcagcgaatcatacagcgcttcgctcagcccgtctttcatttcttcctctatatcctctaaaatcgcatatttatcttcgtaataaaggtacagtgtcccccggctcacacgcgcccgttcggcgatgtccttcatggtcacacggcggatatcccgctctccaagcatggccaaaagcgcttgtttgatgtcagttgtcacagaatccggcataagagacactcctttcattagacagatcaccgcaatttgtacggtaacgtatagatgtgtttacgctgtctttgccgcaaacacacatcacattataataggccctgaagaaacaaaaaagcaaccagaggaggaagaccgatggatcagcatataaaagcagacatcaaacgcgtctttgagcttcagaaaaaaaatcaaaaaacgctgcgtgcttcaacagccgggcagcgcagagaaaagcttcagcgctttttagatgccgtcaccgcacatgaagaagaaatcattgaggcgatcagacgggacgtccgcaagccttatcatgaggtgaaaagagcggaaacgcagggaacgatcaaggccattaaagataatatgaacaatctcgacacctggatggcgccgaaacgcgtcggctcatccgtcagccccgacgctgacggcgtattaatgtacgagccaaaaggcgtcaccttaattctcggcccgtggaattatccgtttatgctgacgatggctccgcttgcagctgccattgcggccggcaacagcgcgattgtgaagctgtctgattttacgatggagacgagccatatcgccgcgacagttattcgcgaggcattttacgaagaagaagtcgctatttttgaaggtgaggtcgatgtcgccacagaactgctcgaccagccgtttgaccacattttcttcaccggaagcacgaatgtcggtaaaatcgtcatgacggcagcggcgaagcacttgtcgtccgtcacgcttgagcttggcggaaagagtccgacgatcattgacagcgactatgatttgatggacgcggcgaaaaaaatcgccgtcggcaaatttgtcaatgcggggcaaacatgtatcgcacctgactatctccttatgaagaaagaagtgcagagcacctttacagatctcctgcaaaccattgtcaatgcaggttttatggaggatgatcatacggttgaccgcaacaaattcacgcagattgtcaacgaccgcaactttaaccgtgtcaaagccctgtatgatgacgccattgaaaaaggggcgaagacggcgttcggcggcgtattcgatgcgcatgaccgcacgatttctccgaccgtgctgacaaacgtcacgcctgatatgaagatcatgcaggaagaaatcttcgcaccgattctgccgattatgaattacgaagatatcagtgaagccgttgattacatcactgaacgggacaagccgcttgccttgtatgtattcagccataatcaggagctgatcgattatgtgctgcagcatacgacatccggcaatgcttctgtcaatgatgtcgtcgttcatttcactgacgtcaaccttccgttcggcggtgtcaatacgagcgggatcggttcatatcacggtgtgtacggctttaaagaattttctcatgaaaaaggcgtatttattcaagcctctaaataaaaaaagaatccgcgcagatgacgcggattctttttttatgatttttttgccccgaatgcgagcagtttcgtataagtgccgacgtaaagcgtgccgtcttcagccagaaccggggaggaaatgacattgctgtctgtttgatagcgccatttttcattaccgtcagcgtcaaccgcatagacatttttatcgtcagaaccgaagtacacattgccgtccgcatcaatcagcggcgccgttctcacaggcccgtccgtatagaaagaccagttcatattgccggttttgctgatggaaaacagctcgccgcttccggaaccgatatacacattgccgttatggtcgatcgctaatgaagagctggagaaaccgtttaacgggaacgtccactttacagcacccgttgatgtataggcgtataagctgccgtcctggtttccggcgtaaacggtgccgtctctatcaataaccggataacctttaaacccgttggacgtcgtttttgaccatttcacttggcccgttccggaattgatcgcgtaaaagatattattgtacgttgccgtatacagagtgccgtttgatgctaacacgggagcggagccgaccacgccgtttgttttaaacttccacttttgcgtccatgtcgaaggcgacgtcggtttaatcgcatagatatagttatccagcgtcgacacatacagcgtgccgtcagatccgatagccgcatcggaactaggcgctccgctcagcggaactgaagttaaaatggttccggtttctttgtcgatgaaatacagttttttatcgtgagaaggaagataaatgacaccgtttgttccgagcaccggagtcagcgtataggtcgtcccgaggttttccgtcacccatttcacagtaccgtccggatgatacgccgtcagcttcccgtcttttgattgaataaatacggtgccgtccccgtcaaccgcggctcccgcaccgttttgaggattggccggaacattcttttcccattttaacgcgccatcggcagtgcttgtaaaccggctttctcttgaccagttgaacatcgtcggagacatcgcctgcgcgtcataccgtcccgccaagaaaccggatgccgcatgattttgtttaaataccgtttccgcagcttgagcagccgccggatgcagccattttgcccccggcagatcagaaaccgctcccacagataaagccgcagcaaccgcagcgccggccgccaatgttttcattcgcaatgaagctgtcttttttttcaatgtcagttcctcccgtttctattaaaagctgctatatcacttcgatcataccataattaacctatgaaatatttgtattttcggtagatttatagaacaaatgtcacatagcctgctgatgcttcggggatgatcgaaacgcggcaatataccacaccacattgacgataaaagccgcgcctgaccaaacgaaaaggccgtaataaagagacagctcctgccctaaggaaattgcggtcaataacgccaccaacaagacagccgcgcaaatgataagcccgattccgcaaaaaacggccatgatgattttcatgacacgaataccgagcatatacaaaatgagcgggaccgcatatataacaaagatctggccgacggcggcccacatgcccgcggaattaaaacgattcgcgttcggccccgtttccgcaagcggagaaagcgagacgaggaccggcaataaacaaaacagcagagcggaaagcaaggtcaccgcaaccgcaccttttttcttttgattcatgtgaatatcctcctcctgacaataacccggcttttttaccggtaatctgataatatgttatattttagcacgatttttacttaatttgagaatgttttgtcaaaaacgaatttacaaatccagaaaaatagatataataaacgttatggaaccgatattgattcataaagcgctatctaacaaaacacgaagtgatattttgacgtggcttaaacacccggaagaccattttgatgaaagaccttatcttgagcagggactcagtttccgcaccggaatttgcgtcggtgatattcaggcaaagtcggggcttgcgcagtccgtcatctccagctacctgctgacgatgcaaaaagccggcctgctggaatccgaacgaatcggaaagtggacctattacagaagaaatgaaaaacaaattaaagcctttgctgactatgtccagcaccagctataaccatgaaaggagggctttttttgttctgacatatctatttttctgtatatgtagttaaataaaaggaggcatacataacaatgaaaaaaagcagctccatcttcattctatttttggcactaggggttttcgggattatcacgaccgagatgggcattatcggcgttcttccgcaagtggcggacagatttcatatttctgcttcaaaagcggggtggcttgtcagtattttcgcgttcatcgtcgctgtgtcgggaccgtttttgaccttgcttgcttcaggtataaaccggaaagtcattctgcttttggcggtgctgatgtttgccgtttcaaatgcggtctacgcgtatacggcgcatttcagtgtcatgctggcgtttcggatcattccggctttatgccacccggtgttcttttctgtagcgcttgcggccgcggcccggcttgtccccgccggccaatccggaaaagccgtaacgaaagtcttttcaggcatcaccgccggctttgcgttcggcgtgcctttcacgtcttatctggcggatcgtctatcccttgaagccgccttcttattcggcgctatcatcagtctcatcgcattcacgggcattcttctctttttgccatccatgccggtcacagaaaaaatgtctttcagaagtcagctcggcatccttcgcaaaccggctttgtggctcaatatcgctgccgtcacctgtctctttgcggccatgttttctgtctacagttattttgcggagtatctcggacgggtgtcgcatatgaacggcacatgggtcagcttcatgctgatgagcttcggagtgattatgatagccgggaatttcgtcttcggcgctttgttatataaaaatatgaaaaagaccgtcattctgtttcctcttctttatacagccgcctacttgctcatatacggttttggaacgtctttcgcgccgatggccgtcctcgtcttcgtatggggcgccgttcattccggcggtctcattgtcagccagacatggcttactgcggaagcaaaggaggcgcccgaattcggcaacagcctgtttgtctctttttccaacctcggcatcaccatcggaacggcggcgggcggctggtttatttcacatttgggaatccatcagctgatgtggtgcggcatcatgtttgcccttctggctttcgggctgatcatgggacgcttggcatggggaaagaggcttctcgcagaagcttaagctccgttgcaaaatccggaatgattacgtataatattccagattaaagcaagggagagaaaaagatacatggaaagaccggcaggattttggattcggtttctggcttacgtcattgatcaaatcatcataggaattccgatttttatcattcaatttatggtctcttttttatttgcggcaggcgttgcggcggctgaccccttcatgaccgaaaatcagtttaacatctcttttctggtgttcggcgtcatcccgattcttgcgagctcttttgtgatcagtatcttatatttcagcctgctcacggcctcaaagatgcaggggacactgggaaaagcattgctcggccttaaggtcgtcaatgaagatggcggacggatttccatcggccaggccttcggacgcgctttcgcatatatcatatctaagctcattctttatatcggattcatcatgggcgccttcggagagaaaaaaacgctgcacgacatcatgtgcagcacccgtgttgtctataaataatgacctcaagtccgggccttttgagcccgggcttttttatgacggctgtgcccgcctgatgtcaatgccgccctttccgtcagcctcaatgcggatcgtcgcgttcacaatgacagacagcggatggaactccgcatgctgatcagaaaaaatccagcggcggccgctcggccctaaaagcaaaaacgccccatcattgtaatcacccataaaatgaaacccgttttccctaagaggcgcatgctttctcaccggaatgccgaaacgctgcagctttctcccggttgatacgacttcggcagccgtcagattcacctcgccgatattcagaacggactcaatcgaaaaatgttccgcgcttggcggcgatgtttctctcgcgatgaattccgccagattgttggacggatctttgaaataaaaggaacgcgcctgaatatgagagaaatacacctcatcctccccatcttccgtttgaaaaacgactttatcctttatccacgccttcgcctcatcaaaacgattattcggaatgttaaacgcgaaatgatacgtaggatgagagtgagaatcggcgcgcctgaattccaactcactttctcccgccttgatggtaaacgaatcaccggactcatcaattaaaggaaaacctaacacccgttcatagaagtgtttcgtctcctccaacgcacaactgtacaaagtaatgttatttatttgcatgatcataccccctttggtttatactgccatatagaagggttgattcctactgtttcgattcaccaattgagaatccccctttcgcccggcgctaaatatgacaaacagcgccaaaccgcttataccaggcgtttttaaacatctaaagcaaaaaaagcagaaaataataccccatatagcttgacaaaaaataaatgttatttaataatctatatataattagaattattattgaaagataaagtgaatgctttgtctttttaatatatttcaaatcacatttcaggaggaagatattatgtctttaatcggaaaagaagtactgccattcgaagcaaaagctttcaaaaacggtgaattcatcgatgtaacaaacgaagatttgaaaggtcaatggagcgttttctgcttctacccagcggatttctctttcgtttgcccgactgaacttgaagatcttcaaggacaatacgctgcactgaaagaattaggtgttgaagtatactctgtttctacagatactcacttcgtacacaaaggctggcatgacagctctgaaaaaatcggcaaaatcacttacgcaatgatcggtgacccatctcaaacgatctcccgcaacttcgacgttcttgacgaagaaactggtcttgctgaccgcggaacattcatcatcgatcctgatggcgttatccaaacagttgaaatcaatgcaggcggtatcggccgtgacgcaagcaaccttgtaaacaaagtaaaagcagctcaatacgttcgtcaaaacccaggtgaagtctgcccggctaaatgggaagaaggcggcgaaacacttacacctagccttgatttggtaggtaaaatctaaggagtgcattccattggtacttgatgcaaatatcaaagcacaattaaatcaatacatgcagctaattgagaacgacattgttctcaaagtaagcgccggtgacgatgacacttctaaggacatgctggctctcgttgacgagctggcttccatgtcatctaaaatttcagttgaaaaaactgaattaaacagaacaccgagcttcagcgttaatcgtaccggagaagacacaggcgttacattcgccggtgttcctctcggccacgaatttacatcattagtgctggcattgcttcaagtcagcggcagagcgcctaaggctgatcaaaaggtcattgaccagattaagaacatcagcggagaataccgcttcgagtcttatatcagcctgacgtgccacaactgccctgatgtcgtccaagcattaaacatgatgagcgtgctcaacccgaatatcactcatacaatgattgacggcgcggcattcaaagaagaagtggaaagcaaaaacatcatggctgttccgactgttttcttaaacggtgaatctttcggaagcggccgtatgaccatcgaagagattctcgcaaaaatgggcagcggcgcagatgcgtctgagtttgccgacaaagagccgtttgacgttcttgttgtcggcggcggacctgccggcgcaagcgcggcgatctacacggcgcgtaaaggcatccgcaccggtgtcgtcgctgaacgcttcggcggccaggtactcgacaccatgagcatcgaaaacttcatcagcgttaaagcgactgaaggaccgaagctcgctgcaagccttgaagagcacgtgaaagattatgatattgacgtcatgaaccttcagcgcgcgaaacgccttgagaaaaaagacctcttcgaacttgaactcgaaaacggcgctgtactgaaaagtaaaacagtgatcctttcaacaggtgcccgctggcgcaatgtcaacgtacctggtgagcaagagttcaaaaacaaaggtgttgcatactgcccgcactgtgacggaccattgtttgaaggcaaagacgtagccgttatcggcggcggaaactccggaatcgaagcggcgattgaccttgcaggtatcgtcaatcacgtgactgtgctggaattcgcgcctgaactgaaagcagacgaagtcctgcaaaaacgtctttacagcctgccaaacgtcactgtgcacaaaaatgcacaaacgaaagaaatcacaggcgaccaaaacgtaaacggcattacgttcgttgaccgtgaaacaggcgaagaaaaacacgttgaactccaaggtgtattcgtccaaatcggcctcgtgcctaatacagaatggttagacgaaacggtcgaacgcaaccgcatcggcgaaatcatcgtcgataagagcggcgcgacaagcgttcccggcctatttgccgcaggggactgcacagacggcccgtacaaccaaatcattatctccatgggatcaggtgcaactgccgctttaggcgcatttgattatttgatccggaattaatgtgaaagccgccatatgaatggcggcttttttaaatatactaattaagaaggcagtatttcctctaaacaatcctcgctgattttataagattttggccttctgcttaccagctcaacaaacccttgctgttctaaataatccattactctgttaattttatgtctcgatttatttgagagctccattaaatcttgcaccgacagcgtaacctgatcatttacaaatacattaatcgtgataatgatattaaaaatatcacgttcatctttataatcagcccattgatcgctatcaatatagttcctaattcgtttcagtttcattaaattaaattcaagatcctcaataattcctttttgtcctgacagaagcaattccagcatatccattaaataaaaagtcagctctccccggtttaaaggtgcgggaatttcctctaatgccttataatacttatctttgttcttattaactgcgtaagaaaaagtgatggctgaatatttttctaagtatcgggacaaataactcccaacgataaggcgtcctgttcttccattgccgtcataaaaaggatgaatgtattcatagtagtaatgagctgtcatgtaacgatacagctggggatgtgtttcatcatgaagataagcaattaaagcctcaagcgcttctgttatcttttgttcagaattaacgccgatatgggtggtcatgttcccatcgttcacttcaacatagccttttctgaatagctcaccatccggcgcatcttctgttccgatttcatctgcgaccagctcgtcatataattccctaaagtcatgaatgcttgtaaacgacggaattcggtctataaattgatatgttttcatcaacccgacaaaccgcttatgtgagggctcggattgttctaacgctttaagagcctctttcaattctttttttgtactgcggattccttcaatttcattattactctgtgcttcattaataattaatttatcaaaataaggtttgacagcaaattcagggagctgactgataagggatgaaattttggaactgtttaacaacacttcattattcagcttcatgagtttatgtgtattcacataaaatagctcaaatgaatcgtccgtggatcggccttttcggaacccccgtatgtttaatgatgttgaataactgccatagctgcttgttctctttttaaattctttctcatatgaatcagcatccattttataaaaaagcttagataacttctcatacttcatattatcacctcgcttaatttaaaattatacactttttttaaattatacaatcattatagcctgatttctaacaaatattctcgctttccaatcaaaacaaaaaacggcgtactgcatggcagtacaccgtctgaagcaattcaatctgtctttctccctctcgcccgatagatgagaaataatccaataaaccacagcggcgtcagcagcaaagccgggcgcgttgcatccgcaaacagcataatcaccagaatgacggcaaacagcgccagcacggcgtaattgataaacggcgcaaacggcgccttgaaagacgagcttgcatgtaagtccggacgggttttcctgtatctgatatgacagacaagaatcacgccccacacccaaatgaaacaaatcgcgctgatggtggtcacgatgccaaaagccgcttccggtatcaatttgcttaaaagagcgccagctgacagcacaataaccgatatccataatgcgcggctcggcacatgatttttattcagcttcgcaaaacttgccggcgcttgtttcgttttgcttaagttatacaaaatccggcttgttgaaaacatcccgctgttacaagcagaagcggcagacgttaatacgacaaaattaatgattcctgcggctaacgggatgccgaccagactgaaggtctttacaaaaggactttccgccgcattcagctgcatccacggattaatacataaaagaatgagcaatgccccgacgtagaaaaataaaatccgcaatggaattttattgatagcggacggaatattttttttcggatttgacgtttccgccgccgacacacccactaattccacaccgacataggcgaagatcaccatctggaacgaaagcaaaaagcctgaaaatccgttcggaaacaagccgccgtgctcccacagattcgccgctgaaaccgttccgatatgcgttttgaacccaatcaccagcagaactacaccgatgacaattaacgcgagaatcgtgactaccttaattaaggcgaaccaaaactccaattctccaaaaatcttaaccgttaacagattaagccctaataaaatgagcaaacagataagtgccggaatccactgcggaatatcaaaccaatatttcacatacacaccgacggcgatcacatccgccatcgccgtcataatccagcaaaaccagtaggtccagccggtgacaaacgctgcacgcggccctaaatacgcctcggcaatatccgttaatgattggtagcccgctttagataacagcagttctcccagcgcccgcatgacgaaaaaaagcgcaatacctacaataaaatacgcaaagatgatagaaggacccgccagctgaatcgccttaccggaccctaaaaacaatccggtgccgatcgtgccgccaatggcgatcagctgcacgtgccgattcgataagtccctctttagctctcgctgctccacatctgactcctccttatctctctagtgaacgacgagcaaaaaaagccaataaaaaaagagattggatgccctccaatctcatggtcataagaatatcaaattatatctgcgccgctgacaatcaacagcatgacaaatacatattcggtactcttctgtccttttgcctgagattgtgaacccttcggcgccgcggaaaacccgcggtctctccagaagccgctcctgctgtagttcgacccacagcaatcatagcctgctacgtattgagtttctgatagaaacacctatcagctaactttttattttaatggaacttgaatgcattgtcaatagagggatgagctgcacggcgttatcccggtccaatttttgatgcctgaagcgcgtattttccgttttcattgtctcaaaaaggcgttatgcggtactatcatataaggtctaatcatttaaacattatgtcatactttaaattcactttatcatacaattgctcgtaaataaaaaggggatggacgagattggaaacgaaatatttagatctgctcgcacaaaaatacgattgtgaagaaaaagtggtcacggaaatcattaatctgaaagcgatactgaacctgccgaaaggaaccgagcatttcgtcagtgatctgcacggggagtatcaggcattccagcacgtgctgcggaacggttcaggaagggtaaaagagaagatccgcgatattttcagcggcgtcatttacgatagagaaattgatgaactggcggctttggtctattatccggaagacaaactgaagctgatcaaacatgactttgatacgaaagaggcattaaacgagtggtataaagaaacgattcaccggatgattaagctcgtttcttattgttcttccaagtacacccgctccaaattgcgcaaagcactgcccgcccaatttgcttatatttctgaagagctgctgtacaaaacagaacaagccgccaacaaagaacaatactactccgaaatcatagaacagatcattgcgctcggccaggccgataagctgatcaccggccttgcctacagcacgcagcgtttggtggtcgaccatctgcatgttgtcggcgatatttatgaccgcggaccgcagccggataagatcatggaagaactgatcaactatcattcagtggatattcaatgggggaatcatgatgttctctggataggcgcttattccggctcaaaagtatgcctggcaaacattatccgcatctgtgcgcgctatgacaatctggatattattgaagacgtttacggcatcaatctgagaccgctattgaaccttgccgaaaaatattacgatgataacccgtctttccgcccgaaagcggacgaaaacagaccggaagatgagattaaacaaatcacaaaaattcatcaggcgatcgcgatgatccaattcaagcttgagagcccgattattaagagacggccgaactttaatatggaggaacggctgttactggaaaagatcgattatgaccgcaatgaaatcacgctgaacggaaaaacatatcaactggaaaacacctgctttgcgacggtgaatcctaaacagcctgatgagctgttagaagaagaagcagaagtcatggacaagctgctgttctctgttcagaactccgaaaagctgggccgccatatgaattttatgatgaaaaaaggcagcctttatttaaaatataacggcaacctgctgattcacggctgtattcccgtcgatgaaaacggcagcatggaaacgatgatgatagaggataaagcttatgcaggccgtgagctgctagatgtttttgaacggttcttacgggaagcgtttgcccatccggaagaaaccgatgatctggcgacagatatgacttggtacttatggacaggcgaatactcttccctcttcggaaaacgcgccatgacaacctttgagcggtatttcattaaagagaaggaaacgcataaagaaaagaaaaacccgtattactatttgcgtgaagacgaagcagcctgccgaaacatcctgaaggaattcggcctcaacccggatcacggccatatcatcaacggccatacaccggtaaaagaaatcgaaggcgaagatccgatcaaggcaaacggaaaaatgatcgtcatcgacggcggcttctccaaagcctaccaatccacaacaggcatcgccggctacacactcttatacaactcttacggcatgcagctcgtcgcccataaacacttcaactctaaggccgaagtgctgagcaccggaaccgacgtcttaacagtgaaacgattagtcgacaaagagctggagcggaagaaagtgaaagaaacaaacgtcggtgaagaactgatgaaagaagtggcgattttggagaagctgcgggagtatcggtatatgaagtgaagaatatggagttcagggatgattctctgggctctttttttttacggttacggactaatgagtccctttccctgtatgtaaaacggatttaaccgcttcttcaatctccctataacccgtacatctgcaaatattggactccagccaattttttatcgtgtcatcacttgcattcggctcagtattcactaaagcatgacaattcatgagaaaacccggtgtgcaataaccgcattgaaacgcgaatttttcaataaaggccttttgaatcggcgtattgatcagtccttcaattgtcgtaatgtcctttccttccccttctgccgcaagcattaagcaagatttcatcggcaccccgtccgttaataccgtacaggcgccgcaatccccatttaagcagcccggctttgcaccagttaatccgagacgaaggcgaagagcaaataacaaagtatcagccggtctgaccgtaatctgtctttcctcgccatttactttcaacgtaataggatcagacatttggacctccttctaattcccgtaaggcatctaaaattgtatgttgcaagacaaatattcggtattcacttgagccttctgcatcatcaagaacaggtttgggtacatattgtaaagacctgcgtactctttcttctgctgatcggcttttatcgttaagcacagcctccatttcagcagaacgaaacggaaatggacatacgccgctgaaggccattctgatctcatcatcttttttcagcgcacagactgtcaccaatggatacccgacattccactgctgtcttcttttgatactgacaaatggcaggtcaacgtacgctcgatcgacaacgacatgaaataaaaaatctcctttttgcaattgtatttccttgttaaatactttatttatgggacggtaatgaatccccgctctccctgcaatccctatcaaactatcagaaatcagcaacggcagcacggcctcacggtaatagatgcccccgcaaatgtttccgcccaggctgatcttatttcgagtcgtccgatcagctatttcactgactgttttacttaatagcggaaatggattttcttcctccagtttcgttaatgacacgcctgctccgatcaccagatcattttcataaaagcggatggtttgaaatcccggaagcgcgttcatatctatcaccgcatccgtatagatgatattcagccttcctaacgtgataatttccgtgccgccggaataatacattggtgttttcttttcggccgcaagcgagtgaaacaggcgggttgtttcttgaatggtcttcggtttaaaatagtcaaaatcaaacggtatcatctttccacccctcttgcgtcctccataattgttcgggaatgagaggaagttgattcaattggacacctaaagcggcggacaggcaatttcccaatgctgccggcatccccaacagtccgtgttccccgccgccgcgcgccccataaggcgcaatcacatgcggggtttcaacaaattcaatgatatattcaggctgctctccatagtgaagggggcggtatgttctaagctgaggatttaatactctgccatatgaatcaaagacaaaggtttctcttcctccaaatgcgattcccatactcatcgcccccatcacttggccccttgccgctttttcattcagtacagttcccatatccacaacagaataggctttagtaattctgtacgtataatcccgtttatccaactcaacttcaattccctgagcaccgacagcccattcgggtcccggctttcctcttcccgtttcccggtctaaattcgtcatccgggttaatgtgtaattgccgctcgcaatgatttggccgccaatggtatttccatttggaaacgtatatccgtaagcaatgtcttttatttcaacatgtacagaaggatgatctataaaataaacctttccgtcggcaacttccaattcctcgacaggaacccgcaacacacatgatgccacgtccttaagctttcgaatggcttcctccgctgcattcagtacggctcttccggccattaacgtccctctgctccccacggttttccaatgctcgggtgttgtttgtgtatctataagcatttttacgtgaattttgcttatatccattttcattcgttccgccaggatttgggctagcactgtttttgtccctgttccaatttccactacccctgacatcaaattaatgcttccatcgggattaaaggttaaaagaaccccggacgttgcatttgtatcaaatgttgaggttttccaaatgcagctgattcccttcgcccgtatcttccggccatcgatttcaattcgctgtccctcgtcccaattcattaattcctttaatctttcaatgcacttcggcacatttccgaccgtgcttgaattgagaagaacttgagtaggtgtggtgtcaccggggcgaatggcatttttatagcggagttctaacgggtccatgttcagcttttccgccaatacatccatcgtccgctcaaaggcaaataacacttcagcatggctgtagcccctgaatgcacttggatatggatgattcgtatacatacaatatgaatcacaccgtatatgatcgatagcgtacggacccgtacaatcaaccaccgcagcccggctgatgtccactcctttatcagaatacgctccgccatcaaataaaaactgaatgtctgccgcctttaagattccatcctttgcagctcctaatttgacaatggcatccaaccctatatgaacgggagatgtgatcatatcctcttctctcgtattaaacaatttgacgggccggcctccaaccgcttttgatgccaaataggcaatcacctctaactgaacggctgcttttcccccgtacgctcctcctactaaaggcgttttgacgataacctttccgggttcgattccaaaataccactgcattaattttttaatggcaaaaggagcttgagaagatgtggtaatgataatctcctcatccgcgcgaatttcagcaatcgagcatcttgtctccatcgcagcgtgatcagaagggttaaaggaaatctggaattctgctgtcacatcactttccctaaacccgtcttcaatatttccttttctaaccttatccaggtttgcgatatttgtcttcggaaccgggaatacaccttttgtcttctcatagcggtccgcattttcatggacgagtggcgcatccttttgaaaggcctcacggggggaattgacgacgggaagaggtttataagatactttgatggcatccgctgcctttttagctgtaattggattttccgcaacaacaacagcaaccggctcaccatggtatctgacccttttataagcaatcggcgatctgtctttaatttcctcacctgcaagcggaaaaggttcatcacccaatatcgctctcacgccgggaatcttccaagcctctgaaaagtccatagacacaatatcggcatgagcatatggactgaccagcattttcgcgtgtaatgtgcctgtttcttgaaaatcatccgtatatttcgctttacccgtcactttttcaagggcctcttttcgaatgacactcttcccgatatactccaactcattcactccccgaatttattcagcagcagcgtataatcttcaactgtatcgacgtcataaaaaagcaaagggtcttgaaagctgatcatttttcccgtattgatcatactttcacggatgacatgccgggcgccctgatctccctttaactgatgcaataccggaaaacattgatttgagaataaaatggggggcataggaagatattgattttcagcggcgataaatgaataacagggctccttttgataggaatcaattaacgtattgatgatatctgcggtgacaaacggctgatctgcaaggagaatgataacagcgtcagcctcgtactctgccgctttttttacaccgcattgtatagaatggccttggcccttacccgcttgctcacattctgcctgactccacttatttgataaaggatttaaaaagaaaacatccgaaagccaatgcagtggatctccctttcccgtaataacgaaaatatgatctaattcagataacaaggcatttttaagagccatacttccaagggagactccattgagaactaaacttcgcttatccgtccccatgcgtctgcttgtaccggctgccaggtaaatggctgctgttttcataagagagacctttgctttcgcatttctttaatcatctcgccgacaatacttacagcaatctcctcaggcccttgtgctccgatggaaagcccaataggggaatgaatatcctcgggaatctcagctccgcctaatagccgctcggtgcgccttctggggcctaatacacctttataaaacacattctcgttttttaatgtatgtaaaatgatctgatctttttgaaagctgtgcgtcataatgacaacaaaatctctttgggtcatgctcaggccttccatgacttcttccggtgctcctgttatcaaatggccggcttcaggaaaatggccgtgatgacataaagcgggacgccagtcaatcaccgtcacatgaaagccagtgccagctgccaaagaaactaacggcttcgcatcttcccctgctccgaatacatataaacaaggttttggcaccatctgatggataaaaaataaatcagaggtatgttcatccctcttgattcccttttccgtctgtctcagtttttgaatacggccttgttccataacatccccggttccaaacacttcgccatcttccactatgtacagatcttcctttggctctaacgttttagtgaatcgtttcattcgggtcacagactttttttcatctaagcatgtcttgactgtcatcagatttcgttccaattccccttttacaggctcaagtaaaaccgtcaaaacaccattacagccaatgccctgtccccaggataaatcgtcctccgcgctcatatcaaagcggacaatcagcggctctcctgcagcccagacctgttccgaccgttcaacgaggtcttcttccagacagccggcggataacattccgactcttgttttatcccctaaaatcagcatggaggccccttctttcttataagcggacccctcagttttaatgatggtagccagtaccttagctttcttagaattggcgatgacatccaaaatccggtgtatatcatccatttcatgtcccccgttttacctgatcatatctgcatctgtatatccgtattctttaatcccggaaaacattacaaacgcttcagcaatttcttcgtttctaaaaaaaaagagtctttatagaccttatgaccgggcggcgggtgagacagcatgtcggaacggagagattccaataacatgatctgttccttctgtttccaattgtctgtttcaccctgctgtatgcctttaaaacccgcaaagtattcacttaacacttgtaaatcattccccagctcccttttgtcacttgaagataaagctccttctttttcccattcttttaacgttttcactatatttgatagatactcaaatccggcgttcaacttttgcatctctatttgatagcttgaaatgatgattttatgtttttttctgacggggttgaattttaagctgtcagaggctgtttgcagcatctcttttgtcatatgcagctcttgcagaagatggttcattctatacgccataaggttcccttttccttgcccccactctgattgtacccatttggaaaggtctgaaagtgtgccggaaagctgacgagccaatgtttgaaaagagtccgctgccttttttgtgtagtccggcggaaaaaggaacatgtgaaccagtatggcaatgatgacgccgatcaccgtatcgatgattcggtcgaatgcataatctttagcgtttcgttcaaacgtaaagaccaacaaaatggtgagcgctacctgatgtaaaaccgttacatctattcgtaaccacttcgcaatgtaagtaccgcctaataggaagagccccagcatccagccattcattggcaaatgactgacaagaaaggaagttagcatgatcccaatcgcagttcccgcaatacgatgaaaagaaaagcgaattgactgatctatcgttggctgcaaacataagataacagaaagaggcgctaaataggggtgatcagagccaactagttttgccgcttcccacgaaacagcagatgcaatcgccatcttccaaaccaaagatgttttgttttgaattttttcacttttcatcatacgccccctcctttcagaaaccttttccactaggtttccgtgacgcaaagggatttatactgtcgtgtggaaaaagcggaagaagctgtgattcaaggggggaattcttgaatgacagcttcttttttggggttgggaacattgggaaacggaaaaatgatcgtcatcgacggcggcttctccaaagcgtgtcaattcacaaaaggcatcgtggctacacgctcttatacaactcctacggcatgcagctaggtgctgataaacaatttgactcaaaggcagaagttctgatcaccggcaccgacgtcttaacggtgaaacgattagtggacaaagagcttgagcggtagaaagtgaaggaaacgaatgtgggagaggaattgttgagggaagtggctattttgaagaggctacgggagtatcggtatatgaagtgagggtatgaggtttagggatgattccttgagctctttttttatttcatttagcactgcaaaccgcaaacattattttaaatgaaaacaaattttgaaaaatgaatgatcagcaaacagactaaattccgtggaagataaccatgacgttattaatatgtaagagaagaatgaaaaccaatacaaacgctgtttttttaggtagaatcgcctttctagagatgggtctgttatacatttacatctttgcatttagaattgataatagaagcttacctacaaattgaactaaacgaaatcatgcttgggagacttcaagaaatacttatttcatctgctcataaaatgtcgattgagtaaataaaaagacgtttaaggtatgactaataaaattgaattcaattttatttttatagaaatcaacatgttcgtgcccttttcatttttacacgggctaatcgtgaaacaggtacgatgacttacagccgacaagggataatacctttaactccttaaaacaccaaatgcgtcctccctcttcattaaaaaactcagatgccggagcaacctcaaattttaagtctaaagaaggagtaactcatttattgatcactcgataaaatgcaatttacatttagaagagtatgaataaaaatcagttaatccatatattattaaattttagtttaaatgttttcctcacattatcatggaaagataattaaaaaagtcgcccattgaatagttgaacgactttcttagtaaattctactttaagatttcctcattgatagctttattaaatccattccgtctatagaaaaatcagttccataaaaaacggaaagttctaaatctccattaactttggatctcctcacttctccaatcccagtgaatacaatatcctgatttttgttttctttttgatactttaaaatgtgatgaaataaccctaaataagctggactattatttatgaatacttcttcaaacttaacatggatatttgttttaccctcttccacaatgatatcagctatcgattctattaatttcacactctttacttttcccattactaaacgaggttttccattatcaatatcctttaacatatccactgtccttttggggaggtttggtcctctaatacctatccttcgattagttacctcttcaggctgatctccatcttgtaaaacagcgtgagtcacgggaacagattcctttccaacagtagtcggattattttttctggttggtttctttgttttctctattgtcttttcatcatcagacatagtatatagcttataagcttcttttaaagccctttttttcctctcagcagtgagttcaacattaataaattgagtagtatcaacacctaccctttttttagctctcgtaaaaccatgaatacaatcgtcaatatggttatccatattccatgttcttaaaaagctttttacaccagaattataaataacccttgcaccgcaattcttagtaggacaatagagataaccttttaaggtttcattatataagtcgggcgtgatatcactcttttcatattccttttctattccatctttaataaaccttgctgttaatattgccaatatatctcctgctttcttgttggttattaagccgaagaaataaaagatagaggtctaagtttgtcttactccaaattaacattcctgtaattttttactatattttaaacaaacttaataggtgttgatttttttaccacactatgttattcttttaaaagtcaattagttataaaaattattagtaagactaaaagatatttttatttaaaaatgcggcaacatttttaaataaaagaaaattcaattaataacacagcctcatacttctacaattttcgaccttttctaaattatagcataggtctatttgtttagcaaacatttcccatttttattctctcaatcatcagattacaacacaaaatccattaacaaataaataaattttcgttttaatattacttgtaaagtttctaagtggggattactccatttattttcataccttccatgtgcaacaagaaagatttcttttaaaaagcaatcttctaattttccgttttttagtgttttcttcttctaagtactcattggctaaagatggtgtacattactaatatcgaatatatcaggtattgtatcaatatatcttgaaggaaagattagcagtaatataaattcttttaaaaattttacacatttaggtgatgcccagtttcattttctttttttaaaaaagcatgttaataagaaaatattagtgatttttttagaatctctaatgatgaaatgagtatttcttttaagaactgtatttacatgagagtatattatacctagaatttacctattattctattagtaatgcacattagtatagattcgaatgggaaaattagataataaaatatataaggaattgcggaggtgcttaatgcttatggagatagaaaatatcgaggaaattccaatacagaaattttatttttcaatgtcgcatctttctcatataagccaagtacaagataatttaccgtcccttttgataagagatttatatagtattgtagatacatactacttagaatctttatcaatattaaggtcttcaaaaaaaaatggtagtagacttaaattggaaattgattcgaaattaaaagaatctcgagaaatgttggaaaagtatcaaagattaagagaacagacgaaagacccggatgaattggaatgggtagatgttattcaatctcgtcatgtgtccgaaagggagttcaaattaaaacaaatagaattagagggtgaaatgaattctttagcatctattgtaatgtttctaagtttattggaatcgactttatttagcctgaccaagaaactcattgaatctgaaccatcacttcctgaaatgaaagatgttatgaatagaagtgataatggtatagttaaataccttaaatatttcgaaaaatacattgaaaagcaagaaaaccactttattgttgggacaaaaaagtatgaattaataaggttttggttgaatgtcagaaataatattgtacatagcaataatgcagtaaaaaaagagattttaagtgatgcaaatagattaaaaataagcatatctattaatagttattcaaataaatttcgctttaaagacattgatataatgtcagttgcagaactttgtggtggaacattggaagattgcattgaaaaaggcttgtataagtattttggtgtagaggacatctaataaaaaagaattatacaagttagtacgattaataaatgaatggtaaaaaaatcagtttttatttcgtttagaaagagtcgttcaatagttgagtgactctttctttcataatcactttatataattaatcaaaaccccactcacttatgataaggctcaccacgattaatccgaaaagcccgataaatctgctccactaaaatcagccgcatcaactgatgaggaaacgtcatcttcgagaatgacagcttgtcatctgcccgtttcatgacggcgtcgcttaggccgagtgagccgccgatgacgaaggtgattttgctttttccataagtcgccagcttatctattgtatcggccagttcttcggatgttttcatttttccttcgatggcgagggcgatgacgtgggtgtccgggctgattttggccaggatgcgttcgccttctttgtctttgacgtttttcatgtcttggtcgctcaggttttccggagctttttcgtccgggagttcgatgatgtcgatttttgcgtaggctgagagtcgttttttgtattcttcaatgccttgcttgaggtatttttcttttagttttccgattgtcacaatattgatattcacaggtcatccccactttagaaacaagttattcatatatattgtccacaattgtggatatcttctctgtattttgtgtaggatcattcgttccctactagatatgttgcagtgtccccacataattcacaggctgtggataaactgttagtatgttcgatttttctgatttcgggcggaagctcatgatcatctatgtacatgtccagcacggtttcaatatgttcttcacaagaataataagcggttttcatcgttacgtcctccggttttcttttgcacgcggcaattcttctcttttcaatataacctatttatacacatgttagtagtgcttcgggctgggttttatccacaattcggcaaatcacgcgcaaaaagagccggtgttttcagcatccggctctttacgtgttttctcttttttctaagcgaaggacgaacagaattcctaatagacacgccagcagtgtagagcaaacatcaatccagtccggctttccgccgttaaaaaaagagttggttattacggaaaccaggagaatggttacggtcaccgcggcaagctttttcttcatcggctccctcctaaattcctctatctctatgttcggtcggcttttctcttgttatatagccttatcataagggtcacaacgatatatacaatcataatcaatgccccgttgctcacatcagggtatccaatcaacatattcattatgacaaaaacaatggttatacaaatgacggacaacaataagaagatactgaatgatttcaaatgaccaccttctttcttgcagtaacgtttcattataaaaagcttaccaaaagcggcaagctcttttcaaatctgcatatttcaaccaaagaattgttcacaaatttctttagcacctgcttcgccaactccattttcaattgctaaacataagggcgagcacactactgcgccgacagcacctccgacagccatacaagcacctgcgcaagcaatactggatcccagccccagcatttttgtgactaaatcgttacaggactccaattttgattttgccggagatgcttttttgacagagttcaataaagcattattccccttgccttttaatccatcttgattaaaatcttcattaataatttctttatctccaactcttaatttgaaatttccttcttttttttctttgtcccattttcctataccctctacggataaaacgatttgctcagagtttaaattaatatacctctgcgcaaatgaatgattttgctgatcttcataatgaaccaatgcaatcttatgatctttattatttaaaacagtcacaaagacttctgttttatccatatccaaatcatctctgtctttgacgatattcaaagctttttgtctgtcttttttacttccttcagacttaatcgttttatcacagacagggcatgtgatttcatcttttattgtctttgtactaatagcttctgtcacacctgaaaaactgaacataaaaacaaaaataactactcccacaaaccatttgaaacgttttttcactatatatcctccttttattcagtctactactctatatcctcaaacgagtacaagtaaaccaataaaaggtttttttgtttatataatccaaagtttgtgttttcattatgatgactgcttttccttctcaaacccatccatcacctgcacatcatacagcttgagatggcttttcggcgtcacgatgttttttaagtttgggatggtcaggccgttcagctttttgcccgttttcaggtcgaaggattcgattttggcgggctttttgtagctgtacgtaaacagatacagctttccgttttgatgggtcagctccttgaagtcggctttcattcgtgatgcggggagcttgaaggcttttttgctttttccggtctcagggttgatacggtacacgtttccgaagccgtcaacgaaatagaagctgcgccgctccatgaaaaagctttttttgaagctgaacggcatggagtcatagatcgtctgttcgtcatttttataagcggcgatgtcatacgttttgatggcgccgctgtttttcatgactttcaccatttgatagatgtgatctgctttttcccctctgatgacaaagcagacggcgctgtcggcggcggcgagctgggattcgacagacgtgccttctttatacgtccatgtcgcgattgattttgtatggagcttctctttatcagcctgaatgtcttggacgtgatagcctttttcgtcatctgtcggcgtgagtgcgaaaagatgatctttaaaaaagcctgaagcgcggatatagtgcgggatgacgtcttgcttccacttgccgtcaatctggcggtacagctctgaacggtagctgccgccgctcttgtcgtagcccgaattatacagcgtgtaaaagcctttcgcccgttcgatatatcccgcgctgtctcccgtatgctggtacgctcttttatacgtgtgaaggccgtcctgaacggtatagattccttttttgtcctccagcagcacgctgccgtcatgcactttggcggatccgagctcaagccccttcatgtgataagaagagagccgtcctttttcatcggcgaagagggcgtagctttttccgccgccgaacgtgtcttggtcagccgccgtggagaaatacagcagcgcctctttatctttcagaaaatcagggtcatttaatgtgtctctcgcaacctccgcaggatcttccgtgcggaaatagaagaagcataagaccgctgcggcggcgatgatcactaaggatatccagatgatttttttcacgttgttctccttagtgaatggtcagaatcgtggttgtgtaggacgagcttgtgatgtcgcgcgggtatacgcctaagccgccattagagtcgatatcaatcccggcttttaagaggaatgccgaccacagcagttttgagcagtttttggcgccttcatggcccgtatttctgttattgacgaagttgaaggagtactcatcaccgactcttgatacagcccagtcagcggcggcttgtttttgggcgtcggtgactttcacggtctggacgattgaattgtcttcgacttctctgccgttataagcaatctggcggacgccgtctcccggcacggattcaacaattttatcagcggatgaatacatgccgacatgcccgtggttgtaataagcggtgtatgagttcgtgtaataaatattgccttttgtgcttttcggaagttttttggttcctgacgatccgcccatcgcagagagcccttctttggaagcgattacatttccctgcaccttgtctgccgtgatttcttgatgaaactgcttgagaattgcttctgttgaaacgtgtttctgtttggcaagctctttggcggattggagaacgtcttgaggagtcgtgccctgctgaaggtctgcgatttcttttgcgtagcgggctgtttctgtttctttcgcttttacattcataccggagaatgacagaaccatggtgaatgacagggcaaacggaaggatggctttgaacagctttttacacatattacttcgcctcttttctttgagtataatttttccacatttgtattatatgacggaattgcgataaaaaaatagataatttacagatttttaaaaattttataacaatatgtaaatcatatgcataaatcattttcaaatatcaggaaatccagttatcatacaagaaagggggaggacatatgaaggacagaacgatcggttcgatgcgggtttccgcaatggggttagggtgtatgggcatgtcggaatactacggcagccagagtgaggaagagtcgatttccaccctgcatcatgccgttcatctcggcgtgaatttgtttgatacggctgatcaatatggattgggtgcaaatgaagagcttgtcggcagagcactcgccccattcagaaaggagctttacctcgcgacgaaattcggttatgtccgaagcgaaaagggtgagtttatcgaaattaacggacggcccgattatgtaaaaaaagcgtgtgacgccagtctgaaacgccttgggacggattatatcgacctttactatctgcaccgggttgatccgcgggtgccgattgaagaaaccgtcggcgccatgaaggagctgatagacgaaggaaaggtgagatatatcggattgtcagaggcttccgcagaaacgatcagacgcgccgtccgtattcacccgattgccgcgcttcaatcagaatattctttatggagcagggaagcagaggagcatgtgctgcccgcctgccgtgagcttggcatttcatttgtgccttacagtccgctcggcagaggttttctttccggaaagatgatgtcgaccgatcagctggatgccgatgattacagaagaagaacgccgagattccagggagacaatttggcggtgaatatagggctcgtccaaaaacttaccgccattgcccgggaaatgaatatcactgctcctcagcttgcgctcgcatgggttctcgcaaatggcgatgatctcattccgattccgggtacaaaaaagaaacactacttggaagagaacctcgccgctctcgacattgtgcttcccgaggatgtgaaggcgcggttggatgagatgtttccgatcggcacggcggccggcgagcgttatccggaacacatgatgacattgttagatgaataacaaaagaggcccatcgtgcgggcctcttttcatgacaactttttgctcatgatgacatccgtctccagaaatccggtcttctcatacagcttccgcgccgtttcgttatgagcgaacacatggagagaaatcttgcggacacccaggtctttggctttgtcctccagccttgcgagcgcctcttttgcatagcctttgccgcggaaaggcggatgaaggccgaaatcataaataaatgcgtcctgctgcgggtggtccggatcggcgtgcagccacagccagccggcattttcctttccgtccaatgtcagcgtccataaatagtgatcggccgtctccaagccgtcaggaagcaggtcattaaacgccagctccgctaattccggcgcttcgtcaggcagccacgttcccgcttttaccttttcttcagcgtaatgcttggttgaatgagcgagataggactgaaattcttgtcctgtcatcggccgcagcgtgatagccattgaatcactccttacaaaacacggactgaaagcggtatcatgaagtattatccgaaggctccgttttccgccggttttatgatttgttcggcttgtgccgttgaaccagtttgcgcaaataatccaatcgaaatgagacttgccaaggctgctgagagtacaatgaatttacatgttttcattacgaatcccctccgttaatctcaaaatttggtcattggcatcaattgattcttgaaaatacttcgccgccagtttgtaattctcctgttttttaaaatgcgcagcggcctgatacgacaagtcggaaacgtcactccacagctctttccttcttaactcggcgaaagctgattcaagcgcttcttcattgcggtcaataaagacatgctgtaagatgcgcagcttttgggtgtatacgggctcgtttttttcttcagcggcattcagcgctttatgcagccaaaaccggccctcatccgcctgttcctgtttcaataacactctggccagcatgtacagactccgcaccgaatacgctgattgcaaatgctccttttgatcgagagccgtttcaaactcgatccgcgcctcctcaagcttttcctgtctttcatagcaaatacctgcgttaaagtgggcgagcgcctcaatatgcggatcacccgctttggcggcttgatgaaccgccgtctgcaggagctcttcggctttctgatagtgaaacaagtccattctgttacagccgatcaccattaaacactgtgcttctctgaccgcgtacatttcattggctttgtagatctccaacgctttttccgcgtggttcatcgcaaagtagttttggcggatttcatagtaggcaatcgccacttgataattaaactcggctctttcaatctcattcggtatgtgccggagcctgctttcagcaatccggtaaaaattaatggcgttcataaaccgtttacggtaaaactcgtgcattccggaaaagaaataataatagtattgaatcatctggtctgttttttctttatcggcgttcagctggatcgtttttaaaatgccgtctgttttctcatactcttccattaaaagcttatagcgggaatcaattaaattaaaataaaggagcaccgtttgattttgtgtcatattttgcagatccgtaagcagttgttctcttaacgcctcagccgattcggtgttgtgctttttgatttcctcataccagtcactgatttttttcgcaactgtttcgtgggccatcacttcagccatctgtcaggacacctccctttcccattttgtgtaataaatatatcatatttacaggttcaaaaagagggtggcagcccgctagtttcctcgtggcaacaaaaaaacctccgcaggtgcggaggcgcatattttataacagtttttttcctaacaaagattccaccagctcgaccgctgttttgccggttttgtttttgtgatcgaggatcgggttgacttcgacaaattcagctgaagtgatgatgtcggcatcatacagcatctccattgccaaatggctttcacggtagctgatgccgccgacgacaggtgtgcctacgccgggtgcgtcgctcggatcaaggccgtcgaggtcaaggctgagatgaacgccgtcacagtctgacaagtagtcaatggtttcttcaatgacctttgtcatgccgaggcggtcaatctcatgcatcgtatagaccttcatgcctgtttccttaatgtattcacgctcaccttcatcaagcgatctcgcgccgatgatgacgacgttctccggcttgattttcggggcatacccgcccaggttcaccagcgtgtcgtgcccgacgccgaggctgacggccagcggcattccgtgaatattgcctgacggcgatgtttccagcgtgtttaagtcgccgtgcgcgtcgtaccagatgacgccgagctgtttatagtgctttgccgttcctgtcagcgttccgatcgcgatgctgtgatcgccgcccaagacgagagggaaccgctcattctcaatgacgctgtccaccttttgggcaagctgctcgttccccgaaagcacggagttcagatttttcagctcttcatcatttttgagtttttcacgattgacggggatgtcgcctaagtcttccaccgcataccccatgtcagataaccgttcaatgagatgcgcgtagcggatggcgctcgggcccatgtccactccgcgtcgtgcttgtcctaaatccatcggcattccaataactgagatattcttgttcatccgtttttccacctcaacatgttgtatgttgtcctgtgcgggtttctcaaagatgacttggacacgaaaagatttaaagctctatctgtttttctgactgcttatgcttttttacatacagatgatagacgataacgcacaccgccatgaacgggatgccgcaataaagggcgagccgctgttctgaatcaaatgcgaggctgatcagaacaaccgtgtttaacgtcagcccgataataggcagcaccgggtacagcggtgttttaaacttcaggtcttccactttgccgccttcgcggatgtatttccgtctgaacatcagctgtgacagggaaatcgtaatccagccgacctgcgcgcttagtccggctaatgataagagaaacatataaacggtttccggcgctgccactttagacagcagtgacaggcaggcgacggccagcgtcacgatcagagcgttcatcggcaccccgcgtttatttgttttgccgagtgatttaaaggcttgtccttcgttcgccatggcatataagatacgcgtcgatgcaaacaggcctgagttggccactgagagcagcgcaattaagataacaaagttcataatatcggcggcatatggaataccgatttgttcaaacaccacgacaaacgggctttcgaccactcccgcctgcttccaaggaatcatgccggcaatgacgatgatggagagaacgaaaaagaccagcgttctccataccgtctgccggatagagcgcggaatcgttttctcgggattttcactttctcccgcggcaaccccgatcagctccgttccctggaacgcgaagtttacggtaatcatcgtaataagcatagccttaatgccgttcggaaacaatccatcctcataaaaatgagagaagaaaggagcctgctcgccgtgtttcatgtcaatcaggccgaacatggcggcgccgcccaaaataataaacagcagaatgactaaaattttaataccggaaaaccaaaattccgactcagcgaacgcttttgtggtaatggcgttcaaaagaaacatcagtccgacaaacacgaggcaccacacccatacgggaacatgcggaaaccagcggagcatcaattgtcccgcagataaaaactcaatggcgcatgtcaccgcccagccgagccagtacagccagccgaatgcgaaaccgaaagcggggctgatgaatttggttgcgtacgtctgaaacgaccctgatacgggaagggcaaccgcaagctcgcctaagcagagcattgtcaaaaacattataaaaccgccgaccagataagacagaaccgcgcccagcggtcccgcctggttaattgtaaatccggtactcaggaaaaacccggtgccgatcactccgcccaaagaaatcataaacaaatggcgtgatttcattgtgcgctgaagctgattctctttttgatttgtattcactattctgcaccccttcagcaacttgtattggaaccaagccggtgctttgaaaccgatttgctgtccaaagagcctctatttgtatatgaatgttatatgaaattcattttcgtacataaagatacattatactaaaatactgtcgccgcgcaaatagagtgtgctgaattttttatttgtaaattccatacaagccgagggaaagcattgccgcatcaaagttttacgcgttttgaagcacgtttgtgatcttttggaccgcccagtccaagtcttccttggaaatcattaacggcggtgcaaaacggatcacggtatcatgtgtttctttgcataaaagcccttcgcctttcagcttttcacagtacgggcgggccgcttctgtcagttcaacgccgataaacaggccgcgtccgcgcacgtcttttatgatcgggttatcaattttctcaagctcttctttaaaataacggccaagctgaagggaacgctctgccagcccttcttcctcaaggacttcaagagatgcgagcgataccgcgcaagcgagcgggtttccgccgaatgtcgagccgtgggaacccgggttaaacacgccgagaatgtcacggttcgccgcgatgcacgaaatcgggaagacgcccccgccgagcgctttgcctaagatgaacatatccggtacgatattttcccagtcaaccgcgaatgttttccctgtgcggccgagtcccgtctgaatttcatcagcgatcagaagcacattttcttccttacaaatggcggccgcttcttgtaaaaatccttccggcggaatgacgatgcccgcttctccctgaatcggttcgaataagaaagcggctgtgttcggcgtgatcgccctgcgcagcgcttctgcgtctccgtatggaattaattttatacccggaagcataggtccgaaaccgcgtttatactcatcttctgaagaaagggataccgcaagcatcgttctgccgtggaagttgccgatacacgcaatgatttccgcctgattatccgctactcctttgacctcatatgcccagcgtctcgccgctttgacagcggattcaacagcttccgcccccgtattcatcggcagaatcatatcttttccggtcagcttggctgttttctcataaaacggaccgagctgatcattatggaacgcgcgtgacgtcagagtgattttatccgcctgatccttcagcgcctgaatgatcttcggatgtctgtgcccctggttcaccgcagaataagcactcagcatatccatatattgattaccttcagggtcttttacccaaacaccctgcgcttcggaaataacaatcggcagaggatgatagttgttcgcgccgtaatgtgaagtttggctgataatttcttgagattttgtgaaagctgacataatctgattcccccttgttttgtaatcattcaacattagatcttgctttccctttttataaagcaagttccgtgccaattcgaaaaaacgggatgtttcgccagcattctttcttttcccgcaaaattttccggcagtttgcgtgcaaacttcagccaagcgcaaaatttttttgcgtttcccgctgacaaaataggagcaatccaattagattgctcctactcaacagttatttattcaattgtctctgatatacaatgtaagaatatagtaaagataatatgatacagccgattgcagccatgaaaatgactgacactctatacaccggcggcaaaaaagctgcaagcatcatgagcatgcccgctaagacaaaaagtttcgaactgaccctgtgtgtatccttccaaactctttcactgctcagcgtccaaggtgttcttatccctaaaaagaaattaggcttaacgatctgaatgaagtttccaaacaccatgaaaatgactcccactataaagtttcctaaataagatatagggagatcatatcccaggccggtcaagatggtaatcagattaatgacaaacagaaccgcaaacattgtattaaagatagccatatatggccggataaacgttttgtagttatttttaggatcaatcttagggatgataaccattaaaatatatagaataatcatgatgccaataagcatcatcatcgcattagctttcgtttggtaatcatttgcacttccgtttaatccccagtgtgtcgccaaattgtccggtaaagatgaatatgtgcaaacccatgtgaaaacagttaaaactatgattcctgccgaaaagagatattttttcatgattccccgcctttcttattatcatgttctgaatcagtcagagaaaagaaccagcctataagatcctgtaatacagtggtatttaatgaatacataataaattggcctttcctctcatcgtgaaccaaatcagtatttttcaatatggtaaggtgatgagaaatactgggttttgacatgtcgaagtgttccgcaatttcaccagctgtcatgtcttgtttctttaataagtccaaaattcttctccttgtaggatcggccagtgctttaaaagctttattcaaaaactttccccctctcacgcatacatgatttagatatttaagtatatatctaaatatcaaccattttcctaaaaaagtcaatggttttattacctcaatttccatttatttttaaacattgtccaagcgcaaaaattttttgcgtttcccgttcgatttattttaaaataatgaatgttaagacgattgagagggggaattgacctgcacacaaccagcgaattttacacactcgtgttacaaagcattctggaagagattgatgtcgggctgcatgtggtggacgaaaaaggcagcaccgtcatttacaataagaaaatgatgcagattgaagatatggatgaacgggacgtcctgcataaaaacctgactgatgtatttatgttttccaatcagcaggacagcacgctcgttcaggcccttcaagaaggcaagacgattaaaaacgtgaagcaaagctatttcaataacaaaggccaggaaatcacgacgatcaaccacaccttcccgattgtgcaaaacggcgagatcaagggagccgtggaaatcgccaaggacgtcaccaagctcgaacggctgatcagggagaacatgcacaggaaagaacagaacagctacacgtttgacagtattctcggcaacagcccggtcattcgggaagtcatcgaaaacgcgaaacgggcaacccgcacatcatcatcggtgcttttggccggcgagacgggaacgggcaaggaactgttcgcccaaagcattcacaacggcagccagcgctcaggcgccccgttcatctcacaaaactgcgccgccctgccggatagcctggtcgaaagtattttattcggcacgaaaaaaggcgcctttaccggagccatcgaccagcccggcttatttgagcaggcgcagggaggcaccctgctcctcgatgagatcaactcgctcaatctcagcctgcaggcaaaactgctccgcgcccttcaggaaaagaaaatcaggcgcatcggatcagcgcaggacaaaccgattgacgtccgcatcatcgccacgatgaatgaagacccgatcaccgccatttcggaagagcggctgcgcaaagatttatactaccgcttaagcgttgtcacgctgatcattcccccgctccgggagcgcaaggaggatattctgcctctggccgaagtctttatccagaaaaacaatcacctgttccaaatgcatgtcgattcgatcagtgacgatgtgcagcgattcttcttggaatatgactggccgggcaacatccgcgagcttgaacatatgattgaaggcgccatgaactttatgacggatgaaacgacgattacggcggcccacctgccttaccaataccggatgaaaatcaaaccggctgacacggaaaccaaagccgccgcaagcacccagcccggcaccgatttaaaagacaaaatggaaaacttcgaaaaatacatgatcgaaaaaaccctgagaaaacacggcaataacatatccaaaacggcaaacgagctcggaatcagcagacagagcctgcaataccgcctgaaaaaattcggtctggaccggatgaaataaatccatacaaaaaaaggctgagttgctcctcagcctttcgtttatatctgattggcaagccgctctccggtaaaccaaaagttctcactcactgccaatgtatgttccgtattctcgacttgatgccaccaatggcgcggcgcgtaaatgatttctcccgccttttgtctgaagcggatcggagacgccttttgcaccagcggtttttgctcaatgtctttttcatcaaagacattgatatttccttcgtacaaatacggagagtcgtccggatgatagaagatccattccttctccccgaaaatgacgccgttccacgcgtgcgtgttgttaaaatcctgatgcagcggtgtgcctgtctgcttagaaccgagaaagaaccatttccagtctcgtcccgtttcttcatccgctctcaatgtgtcttttgtaaaatactcgggtgcggaatagacaaggtctaagtcattttggttcagctgcgtaaaattccagtcacagtaccatttgtcatcattctgatcaatgtactcgatatagttggaaagctttacttgtttaaaggttttgaccccttcgatatctgatttccggatggtgaccattctgtccccatagtgttcatcaatgtattcaagcgtccacggcctgcattcccagtgatccattgcccccgtcaaaataaaaggttttttatcagcatactcgcttacaaaaagatcgtacgataactcattgattgtcagtctgtcaatggtcatatccattccccttttattcggcaatctgccgttttttttgtttggcgtaactgtatggacctgaaaagatggtgacgttttgattctcaagccagaaaatcttgttgaacttctccagcaggtttctgtcatgagaaacgcagatgatagtgccttgaaactgcatcagactgttttcgagaatttcctgagattcaatatccaagtggttggtcggctcatccaggatcaggacattcagctttttttccattaagatggacagcttcagcctgattctctcaccgcccgacaggacggaaagttttttaaagaccgacgacccgtaaaatccgtacttggccagcatattccgggccatgccctcttcagtcagcagattttctttaaaaaattgcagaatcgtctgactcgaatctcctacatggctcttttgatcaatgtagcctattttaagattttctcccactttaatggtgccgtccgacagttctctttccccgatgatacagcggatcagcgttgttttgccgacgccgtttctgccgacgatgccgattctgtctttatgctttatgcgcagattcacattttgatataaaagggaagatccgttggtcacctttccgttttcaatgaacacaatatcttttgaaccggcgcccgcttcctgaaatgcgttttttaatttttgctccgtccggaccggcttattgatcagctcgatccttttcagcgccttttccatattattcgcgcgtctgtgcaggccgacagacggcggatttgagcggttggcccattctctcagctgggcgatggattccttcatcttctgtatttttctctgctgttcttcatatttctcaaactgggcgatgatgaattcttcccgctttttcaagtattcgctgaatccgtaaggccaaatcttcacctcggtatcgtcaatctcgagcaccttcatcgccgtttggtcggcaaacgttttatcgtgggtcgtaaacagaatggttttgttcgattttttaataaacccttcaagccactcaatcgcatggacatccaaatggttggtcggctcgtccagcagtataacgtcgtcgttgcggattaaaatttcggcaaggccggcttttgttttttcgccgccgctcagctttgaaaacggctgatcctttaattcgctgaggctgagcccgttgcatacctcgtcaatcatcgcatgcatctggtagccgttgttccgctcaaatgtttccgtgtattgactgtacttttctaataaagcagtcagctcatcatcactcatcggttccgaaagcttcagctcaatggccttcatttccttctggatcgccgctagagcttcaaacgatttttccagatattgatacaacgtcagatcctcattgggatcagcgatctgcttcagcaaaccgaccttcgcccctttgttgatcgcaatcgttccttcatctgcctcaagctctccggaaagcaccctgaacagcgtgcttttgccggaaccgttcggcccggccacaagcactttttcgccttcattgatgaaaaaagaaacttgtttgaaaatggtatctcccgctaaatttaccgtaagattatgaatattcagcaactcacatcatccctttgtcattctggttcaaagctcgactttattctggatggcgacgctcgctttcagtttgtaaaagctgagcatcataaacagcgacaataagatggataataacccgattgcggtcagcagcaaagctgaatcaaaatagtccgttaagaatccgataaacggaaaggcaatgaacatgaagagcgaggtcatcaaactgataatggacagcagcgtggctctcgttctggacggaatctcattattcaccacctgactggatacgggttctatcacatcatagagcgcgttaatgacgacaaaagctgcaatcgtcacgtacagactgcccgaaggtataaacagataggccgccccgatgatgcagaatgtcagcagaagcacgcgcctcggcgtgaatttttccgccggcttggaagaaaagatggagcacagcgcctgcaagatggacagtcccgcaaaaataatggatatattgcgcacggacagcccttcctgacttaacaaatcttgtccgtacatataaaaaaccgatgtaatcgcaaagaaaacggagagtgacagcaccagatatttaaaggctttgttcagcctgaagaaatctttgacttcttttaagatgtcaccgaccgtctgcgtttcgtgttcactgttttcaaatttgatttccgtcagctgtgtaatgaccgccattgcaatcagctgagtgacaatcccggcgataaacacatacgaccatgatatttcctgcaagtagccgccgatgcccatggcgatcgcaagaccgagtatgacaagtccgttataatttccgatggatttgccgtaccatttttctttcccttgttctttcagtgaatcaaacaaaaaggcatgatccgttcctgatataaacgtcagcccgataccgtatataatatgggcgatgaagagggcgatgaagttgtggaagctcaggaacatcaccaaatagacaatgaccataaaatggccgagcaagagcgatttttttctcccgattctgtccgagatgacgccgctcggcacttccgccagaaacatcgccaaattcaggaccgattgcaggatgcccacaagaaataatgaataattcatgcttgttaaatataaaatccaaattccccgttcgaaaaagaagtttccgaaaaaaccggagaagtaaagcaaatttcgattccgcaaatgaatacccctttccagctatctgcatttaacatcatgaacagaaaggagcccgtcagtctttacactaaaaccctctatacatggatcttgcagatacagacttttcccaaaacaaattgggcaataatgagttgtattctcgaataacccaaaaagttccttctttttttcagatcctacggcatcaatgatcgtttttttcttccctggatcgctgatgtcgcggatgaaatatttgatatagctcagctcatgcatgtaagccggcaggaacaaatggagctcaatatcaaaccggcttttatccatatggtaataatcattgaaatgactgacgcgggagacggacacgtccgctccggcccgccgaaacaaatcagccagcctttcaatgatctctccgttgggataataatcggcataaacgattcggatcggttcttctcttgtcaaaaggggcggatctttctgcggtgtcctcccgatttcccatataccgatcagtgaatcagtcggtgtgatgatatgccccaaatcgccggccagcttttgtttattaaaataatgctgaatgaaagttctcagcatgtcgtcctttaccttgaaggtaaataacatcggcaaatgattttctttaaaatcagcatactgccgatacctcatgtttgaatgatgaaactgggtgtggcaggtcacgtccgtttgattcgcttcgtacagcccgatgcttttttccagatcatcattcaaaataaattggatggtctgaaccgtgcggtgatccgcgggcgtcattttatattgcggattccgctcaaattccagccccttctcaaacgtgcgcttgaatcggtacgggccgttttccggcacatcgcccccggcggtccccggaatcagaaagctgctctgcaaaacggcttctatttcatcagacggctcgtccaaggtgacttcaaagcgtttttcgcctgttacgttcaccccgagctgatcggatgagacgaggccttttacatacggaacggcctgttttatgttcaggaaactgccgagatgggggctttgattttctttcgtcagatgatagatgatcgtttgaaccacaccctcggcgtcacctaaatagtccgggtgaatgtccacctgacaggtgcggggatctttgcggatgatccggcagttatagccgtcctgcagactttcatacataatgctgcaaatcatcttgcttgtgtaatcctgcgtatctaatgggttcaagcgtatcgggcttgtgtcgatttctattttcagagggtcgcccggttttctcgccgtacgatgcatcgtcttcataaagcgctttccttttgagaaagtttcgtttctgtaatatgaaggccgtcaaagtccaggccgatgcgggtattcagggatttcgggcttccgcctgcaaggtatgtgataatgtcatgagacataaacgaggatataataccgtttgtcgctcctaaggaacctttgatcggttcatcggggtaacagttcagaagtccggccggcaagtttttttcataggtgacgccggattgataggattcaggcgtgagcagaggcccccattggccgctgaagctgccgacacccccggtcataaatgcaatattccgctccttacaataccggtaaacccattcagaaatgttatggggtttgtcagcggcatttatgacgatatcaatttcgtacggatctaacacacgcaggtcctgcggctgtgtaatttcctgatggtaaagtgctgcgtccgcatggggattgatacccgtaatataatctttgcattctgagatctttaatttgcctacagaagattgattatagacgaattgtctgttcaggttatgtactgatacggcatcgaaatcaatgagaataaaatgctgcatgcccgccgccaaaagattttgaagaatgatcgttccgacgccccccagacccacgatcgctgccctgctgccgtctaatctcttttggatcagattggggttttggttgtatttctcaaaatggtacagctgcttttcagtgatgcggccttcacggccgttttgccatggctctattaaagcatccaatttcattaatgcatcgaaaaaatggtttcccgcttcctctcccagaagatcagaaagctcttgtttttcacagccgatgatcagccgttcaaccgcctctttgatctcactcgtatgcgcaagcttaatcgcctttcgattttgaatgataatatgcgccgtgtaggtcagcacctgcacgctgtctttaaacttccagcgcttacagtccgttgacatcatgacataccccctgaaagataataactccccaatgaggggagtcacggctttactagcagcgatgcaccaagcttgctgtttctgtatcaagatcaagttcttcaatcttcatcagtacacaccccctttaccaataactagatattatcatcaatattggaaaaggacaagtaattttttgaaaatttagaatttatatataaattgtgatatttcttccttctttacggtttatcccggcagccggatgatgaacacggagccttttccctgctcacttttcacttcaattgttccgttatggctgtcgataatggtttttgtaatggcaagacccagccccgcgccgccggattgacgggatcgggaggtttccgccctgtaaaaacggtcaaacaaatgaggcacatgctccggagcgattcccgttccgttatccgcaatcataagcatgattcctccgtctttctgcagggagacggtgatgacacccgtgtcttcatccgtatgctgcaccgcattgtaaaagaggttgagaatggcctgcttcattttgtctttgtcaaaaacggcttctatcttttgatcgacaaagaactcgagcttccggtttctcgcgagcagcttcagctgagcctccatttccaaaatgacgtctcccaatgcgccttttttcatttcaaagctcggcacccggtcaatcttcgcgagaaacaaaagatcctctatcagcttattcgccctggcggattccgcgtacatgctttgaagcgctttttctttctgctccggcttctccgccgctcctcgcattaacatttcgatacagccgtgaatggaggtaagcggcgttctcagctcatgcgatgcgtctgatacaaactgccggattcgttccttctcttctttttccgcctgaaaagaggtttcaatccgttccagcatctgattgatggagatgcccagcgactcaatttctgcctgccttttatcaatcggcagccgcttatcgagactgccggcatgaatgtcacccatcaaacgcacaatgcgggacagcggcttgagtgtgagccggatcaccggcaaaaaaacaaacaggccgatgaccaaagcggcaaaggaaagcaccgcgaaaatgctgatctggcggaaaagcgaatcattcagaggctgggtcagcgtgctcatctgcacaactcccgcctgccttccgtcaacggaaatcgcctgaaacacgacgatgatttcctcacccgccttattgtgagccacctgatagtgaagcgccattgtatctgtcagcgcatcccggtacacttttttcgggaaagaaggagcggcccccgcgttcgggtcttctgataaaacagacatcttgtatgattgattgataaaagcaaccgtcaccccggggtaaatcaaattcggatgagccggtgtttcggaacgggcaagggatttgattgacctccatacgctttgatccattgaattgatatcactctgaatgctgatcgcctgattttcatacatcgtccgtgtcataaacatgtactgagtgccgccgatgaaacataacagcaaagccaaaatcgccagtgacctgaacaggagctggaatcgcagggttctgtacagccgtttcatgccagatccaccctgtacccggcgccccgaaccgtgcgaatcaccttgtgttctttgtccttcagcttttcgcgcaaagaacgggtgtacacctcgacgatattgtcttccccgaggaccgttccgtaatgaagccccatcgttaaagaatcaatgagtgcagactcgccgtctgcactcagcttgatgcctttcaacttttccatgatgcagtctctccttagatgtatcagcctgtgtttatttttttcgcttccccttctattattcgcttttatctgaaacaaaacggaatctaagctgaattggtgaaaggaaacgctgaaaacggagccatctgcaagtaaaaatcattatctacgcttcaattcagcagcaccagttctaggttcacgtctcctttttctacatatacccatttttaactgaacgtgttgtgacccgcgttcagttcttttttatggcttctgaaaaaaggcataaaaaaagcgccctgaaaaaggacgtttaatatgacatgtttcatgttcttaaattctgcattctaaaataattcttccttcacattcaccttcaatttcattcaatacgatgatcacatcagccgttttcatgtgtttcacctcccgttttcacaatagtataatattaacaaataaatcaataaaaaacagcccggatgtccgggctgttttttatttctgtaatcgatccgcttctgtcagtttgacttccgctgtttttttctttcccgaacggtagaacgtgatgttcacacggtcgccgatctttttgcgatacaggcgctcacggagatcaacaacgtcattgaccttatgtccgtcgaacccggtaatcacgtcgagctttttcaaacccgcttttccggccggtgaaaacgcgtcgacacccataatgaccgccccggttttaacgcctttcggaagtttcagcgtctggctccaatggtagctcgcaatatccgttaaggatttcatctcaataccgaggaaaggccgtctgacttctccgtatttttctaaatcctgaataacgggaatgacaagctttgacgggatggacaggccgatgccttcaacggcggattcagcgatcttcattgagttgatgccgaccaccttgcccgatatatccatcaaagcgccgccgctgttgccggggttaatcgcggcatcggtctgcagcacttccgcattccaatccggctgtccgtcgccgtttgagtcaacgggcaccgccctttccgtgcctgaaatgatcccctgtgtcactgatcccgcaaattcaagcccgagcggatttccgatcgcaatgaccggttctccgactttgacctgatcagaattgccaaactgggcggccgatttgattttatcagacttcaccttcagcacggcgagatccatcaaacggtcgctcccgatcagctcagcaggcacgcgtgagccatccttcaggctgatctcaatctcagtcgcaccttcaatgacatggtgattggttacgatataggaagtgtttccgttctttttgtaaatgacgcccgacccgcttcccgcttcgccgccctctccccaaatatcggtcttttggatattgagaacaccgactaccgaatctgatacacggctgaccatattcgtgacagcgtcattgacatttacgttgactgttttcacctgttcgctgccgagacgctggctggtgcttttgctgctttctccatggtctccgcctgtccagtacggcagcaggaaagccatgagcgcggccccgacgatgacaccgatcagacttgatagaaagtaccctctcttgctgcggcggggctgttcggaggcgtactgttcatcatcgcgattataatccaccctatctcaaatcctttcaagagtactcgatttgcttatagtgtgggtcagatcgcggattaataatcatgattcatttggaaaaattacacggcgcacagcggcgtcgggattttcggatcggtatcaaataactgaaacgtttccccggcgacaaatcctttcgcagccaatgtctgctgcacggacattctcgccagttccttcatattgttgtcttggctcagatgcgccaaatagatgcgcgatgtgccgtcgccgatgacatcagtcatggcgagcgccgcgtcttcattggagacgtggccgacatcgcttaaaatccgccgcttaatgctccatgggtatctgcccatttgcagcatgccgacatcatggttgctttcaaacacaaacacattggccgaacggataatgcctttcattctgtcgctcacatacccggtgtccgtcatcagcgcgagctttctgccttggtagtggaaaacataaaacatcggctcggccgcgtcatgggagacgccgaatgactcaacatcaagcccgccgaaggattttacgctttccatcgggaacaaaaacttttgtccggtatccagcttgccgatctgattctccatcgctttccacgtcttttcattggcgtagacgggaagtccgtactttctcgcaatgacgccgagccctttaatatggtcgctgtgctcgtgagtgacaaagatgccgtcgacgtcgtctatcttgcggccgattttctccatcagcccgtccatcgctttaccgctcaggccggcatccaccagaaaagagtgctcatctgtctccagataaaacgcgtttccggtactcccgctcgcaagcacgctaaattgcaagcccattgtgtctcactccattatttattttgattgttatcaatgactgtgctttccaatgcattcacagtgtacgtttgctgtgtctttttcttcgtcccttttgacttatcttcaattgtaattctccataccggcgccagcacctgcgtacttgtcagcggatattgggcaatatagccgaacttaacgcttttaacggcgcaattcgcttttaagtaattttgagaatacaataattcgaccgcatcaagctcaggaatcaggctctccgtctggattcgcttgaatgactccagcatggtctgctcgtaagatacgacctcgtttttatcgttcagatgcagaatcacctgtccgatcgcatccgtggacgagtcaaaatcctgataaataaactggccgtcatacatctggtaaaaagtgatctgttttttatccttgtcgactttccacagtttatatttttcaccgccggttattttagagctgacgagcgattccgcatcctcctgcggtttttgcttcgataaaccgaccggatcggtaaatttcattttcagtgtggtaaccttgtgatcatccgccggcatctccattaaaggcttttgatctttcaaagcatcaatatcttcggcggtaaataccttttggcccgccgtcagccggtagcccgtcgcggaatcagaagacaggttgccgaaagtgatatgatccatctccatgtctttttccacatttgaatttttaatcacttcgtattcactgctcgagcgtttttcaaaaaactgatagccgagaaaaatatcgaggatgaggaaggcaatgatgaagatcgtttttgtcttattccactccattatcgtcctcctccttccccagcagatctttcgtaatcgggacgatcttcccgttgattttcatactccagacgggttccagttcaacgagatcattcgttgatgaagagaccatttgataggacaggaagatctggtcgattttattcacgtcgtatttatcctgctgctccagcagagacacaacctcattgccgttcatcatttttacgtcttttgttttaatcggattcggcccgagaacatagttcggccgcttgtagctgagaacctcgtcattggcccattgcagggtcaaaacaggtccggatccgaaaggcttagacgtgctgttgatcacaggcatttggtctttaaacatgtagaaactcagctgctggttatcactcacattgaaaaattgataatgatccgtccagcttcccgtatcctctaaatatttatagcttttcttaatcagctcccctgtttgataagaagcgctttgtgccaggttccgatgctggaattgaatctgccgctgtgtcgaattgatttccagacggctgattccgtcagtcagcacattccgattgtaattcgggtcttctctgaccgtgctcggatcattaaaaagcgtctgcttaaacaggttcgtcttaatggtttcagtgataaattctttttccttcatattaaaccgcgcattcggcatgagaaattctttgctttttccgaccgaatagaggtggtataacggcatactcgactttttgctgtacagctcattcatcagattgcggtaattcgccgattccacagtcacttccaaaatcagctgcttgctgtatgagaccatgtaaatcttcttatttgtcttattctcattaaacggaatgacaatatggtcaaatgagctgtattccattgacggattcgaccatttaaacatcgattggaaaaaatcaatcggaatggtgtcattgaattgcagatcgagctttgccgaattgccgtttctgccgtaaagccaatttttaaaaccgagcttgtcgtattgatcggaaatatccttcatcccttttacttcccattgcggcaaatccgcccacaggtcattaaagagcgtctcatcatccactttataatgagagccgtttgtatgaataaacatatcccgaggttttaccgtttgcgacactttttggctcgttttatcaattttatgcttttcccggacagtcgatttggttgaggccgtgccttctgaaaaattgggctggaatgtccaaattccccatgttaaaacaagactaatgacgaccagcactgacagtatgactgtttttatattttcacgcctcatcccaatcatcctcttgctcttctttatatggaagagtaaatgtaatcttcgttcctttgccttctacactgtcggcccaaatgtctccgccgtgcgcctgaaccatctcttttgcaatcgcaaggccgagcccggtgccgccgagttttctcgtgcgcgctttatccactctgtagaaacggtcaaaaactttttccacatcttttttcggaatgccgataccttcatcttttacgctgatataaagcagctcttctttctcattcacatcgactgagaaagtgacatgtccgccttccggtgagtatttcagtgcgttagaaatgatattatcgagaacctgcgtcactttatcctgatcaatctccacgtacagatttctgtccggaagctcgcggataaattcgacatgctgttctttcgtcatttcaaaacgatcgataatcagtgacataaagcggatcatatgaatccactcccgattaaactgataatctttgctgtcgaatttagaaagctgaagcaggtcgttcaccaatctgatcatgcgctcagtctcattttgggtcaccattaggaaacgcggagcgatatctttgttttcccacgcgccttccgcaagcgcctctaaatagcttcgcatggtcgtcagcggtgtcctcagctcatgagacacgttggcaacgaactctctgcgttcccgatcgagtttttcctgttcggtgacatcataaagaaccgcgattaaaccgtcgatttttccgtgctctctctgaataacggaaaaattcacccgcagtacagtcgtttcatcgtcacgttcgatctccagcagcattgaatcctgctgttctactaaatcctcaaatgtaaagttctcttttatgcctaataaagacgtaatcggcatctctaaagccgtttcacgtgaaacattcagcagctcaagcgcagggctgtttaaaagaataatagctccattgcgattcgttgcgatgacgccgtccgtcatatacgcgataacggaagaaagctttcttctctccccttccgtcatggcttgggcatcttcaagctctctcgtcagatggttgaacgtcgttgcgagctgaccgatttcatcatgcccgtatttccgcacctttctggagaaattcccttttgccagttccatcgcctgcttacgcatatctgacagcggatgggtaatggtgcgggcgagaaatataccgagaagagccgtcagaacaagggctaagcctgttcctgaagcaagaatcgagttgacggttttcatctggttaaaggtatcttccatactggccacgacatatatcgcgccgacaacttcctgattctctgtgacgacaggttttgctgaaatcagcactctgtttttacttttaggatcataatatttttttgaataggcctgttttgttgagaaaatccgtttaaaaatcgggtcagtcgtctgtttccccgctatttcctcgccataaggcctcgaagaaccgacgacctcatagcttttatcaacaaatgtaatctcccgtatttcattgtttttcgtaaaatcattcaaaatccgtttgacgtcatctttaatgacggtgctgtcattatctcctttatattcctgctcaatataataggatagattgtcaatccgctgatttaacgataattcataggacttgagaagagaattctccacctgtttcacaaagtacacaccgataatctgcatggcgatgataatgagaagcacatagatcagcgtgatcttaaactgaatcgaccgaaaaaaaccaaccttattcatcgccggttagtcctgttcagggtttctcaagtaataaccgacaccccgtcttgtgacgatccagttcggatggctcggattatcctcgattttctcacggagacggcgcactgttacatccaccgttctcacatcaccgaaatagtcatagccccacacagtctgcagcagatgctcacgcgtcataacctgtccgatatgtttggctaagtaatgaagcaattcaaactcacgatgagtcagctcgatcgtttcttctctttttgatacgacataagcgtcagggaagatgacgagagaaccgatatgaatgtcattagaagcggattcttcctcagccggcgcaaccgtaagctggcggcgcaggttcgctttgacgcgggccagaagctcacgcgtgctgaaaggcttcgtgacatagtcatccgctccgatttcaagcccgatgaccttgtcaatctccgagtcttttgccgtcagcataataatcggcatatcatattttttccggacttcccggcacacttcaactccgtctttattcggaagcataatatctaaaagaattaaatcaggctgaagctcctccaccatttccacggcttcgtttccgtcgtacgcacaatgcacgtcatagccttcttttcttaaattaaactctaatatatctgcaatcggtttttcatcatcgactacaaggattttcttatccatcatcttgattttcctcctgccagaatgacttcatttcatctattgatgtttcatgatgatcacaattcggatcgtgaaaaacgttccccgtctattataacggtttcaggtcaaaagataaaaaaattaaagagaacagcgcaaaaacgtattgaactgccatccttttgtcatgttttttattttcttttaaaaaataatatttttttgaaacctcacgaaaaaaaacgccgtctagtgtttgacgtcttcttctgggccggctgaaaagccggctctccctttttttataacaaaagaaaaaacgcacctactattgcagatgcgtttgggtaagtggctcgggacggaatcgaaccgccgacacacggattttcagtccgttgctctaccaactgagctaccgagccagatgtttcttttctatactataaagtaaagtaaaatggcggtccggacgggactcgaacccgcgacctcctgcgtgacaggcaggcattctaaccaactgaactaccggaccttacagtaatttgtccggagagccgtatcgtggcggccctccgaggacaaataaggagttagcaataacgctaaagtaaatcaatgacccgtacgggattcgaacccgtgttaccgccgtgaaagggcggtgtcttaaccgcttgaccaacgggccataaaaagtggtgagccatgaaggactcgaaccttcgaccctctgattaaaagtcagatgctctaccaactgagctaatggctcctgatgtgtcggattatgtatcatagagcattcagacaaaagctttcttgcagtactctattgaagctgttccgtaacaacgagatttataatatcatagaacattcgaaagtggcaactacttttttgaaaaaaatctattatttttttcctacataaaaaaacaagcctccgtgaccggaggcttgtttgctgcaaattcttagttagcgcggtatacactgcggatgacgttcgtttgtgaacggtcgggaccgacagagaaaatagaaagcggaatacctgtcagctgagatacgcgttccagataatggcgcgcattttcaggaagatcgcttaatgtttttgcgcctgtgatatcttccgtccagccaggcatttcttcatataccggttcacactctgcgagagctttcagacttgccgggaattcttcaatcacttcacctttgtagcggtaagcgacacagattttcaatgtttcaatgccagtcagcacatcgattgagttcagagaaagatctgtgattccgctgacgcggcgggcgtggcggacaacaacgctgtcaaaccagccgacacggcgcggacggcctgtcgttgtgccgtattcgcgtccgacttcacggatttgatccccgatttcatctttcagctcagtcgggaaaggaccgtcaccgacacgggttgtgtacgctttagatacaccgacgacgtgctggatttttgtcgggcctacgcctgaaccgatcgtcacccctccggcgaccgggttggatgaagtgacaaacgggtatgtcccttggtcaatatcaagcataaccccttgagcgccttcaaataaaacgcggcggccttcatccagcgcgtcatttaagacgacggatgtatcgcatacatactttttaatctgctggccgtattcataatactcatccagaatatcttcaattttgaagccttctgtttcatacattttttcaagcagacggtttttctcttcaaggttccgttcaagcttttctgcaaacacgtcacgatctaacaggtctgcgatccggatgccgatccgcgccgctttgtccatataagcaggtccgatgccttttttcgttgtgccgatcttgttggcccctttgcgttcttcctctacttcatccagtttcagatggtatggaagaatgacatgggctctgttgctgattctcaagttatccgtgctcacattgcgttcatgaagatacgcaagctccgttatgagcgctttcggatcaacaaccattccgttcccgatgacacacgctttttctttataaaaaattcctgatgggattaaatgaagcttgtacgtgacgccatcaaacttgatggtatgtcctgcattgtttccgccttgataacgtgcgatcacttctgcattttctgataggaaatctgtaattttaccttttccttcatcgccccactgcgtacctactacgactactgaagacatatatccgtgcacctccgttaacctttcaaaacgatatctcattcaaacaaattaagtgtatcagtgccgaaacagaaagtcaatcgtaaaaccgaacatttaaatcttatcaatctatatttgttcgccttaaacatgattaaaagcgttttctctttcatttgctatctattactcccgaaactttcatgctttaacaagaaaaagaacccgtaatcagggttcttcagacagtcatttatatgccgcttgtattcatcaggacgacccgccagccgtcaggatcttcgatggtcacgcctttttcttcccagtacgggttttcgggtgctttctcctcatatcccatctgctttaatttcgtgctgatgcggatgacctcctgctgatcctggatgtaaaagacaagcaggctgtcgccgtgcggaacgggcgccggctgagacgcgccggtttcttcggtgaattctaagtgatattgcgtatggggcaggccgaacatgacgccgctgtagccctcatgtccggaaaagctgccgaccctcttcagcccgaggccctcttcataaaacctgatgatttctttgagctgtccggtcggccgggcaatccggatttgcgccgcttgaaattgcggaaattcaattgtcatcatcattcctcccttaatgccattatataaaagcgctttctttttttcgtctgccgaacggacggcattctttcattctttcggatgaaaaaaagcctcaagacattgcttgaggctttacgcacctgccggaacaccgccgtcatcaaagcgcctttccaggtttacgaacttattgtattctttcacaaaagccagtgagacggtgcccaccgggccgttacgctgtttggcgataatgatctcgatgatgtttttgttttcggattctttatcatagtaatcatcacgatacaggaaggcgacgatgtcggcatcctgctcaatacttcccgactcacggatatctgacatcatcggacgtttatcctgccgctgctcaacaccccgggagagctgagacagggcgatgaccgggacttcaagctcccgtgccagcgcttttagcgcccgtgaaatttccgatacctcttgctggcggttatcgctcgaacggccgcttccctgaatgagctgcaggtagtcaattaaaatcatgcccaatccgttttcctgcttcagcctgcggcattttgaacggatttcgctgacgcggatgccgggggtgtcatctataaagataccgctgtttgacagacttcccatcgccatcgtcagcttgccccaatcttcttccgtcagatttcccgttctgagattttgggcattaatattcccttcagcgcagagcatacgcatgacaagctgctcggcacccatctcaagactgaatatcgcgacgctctcatccgttttggtggccacgttttgcgcaatatttaaggcgaatgccgttttccccacagacggacgggccgcgacaatgatcaaatcattccgctgaaaacccgccgtcatccggtcaagctcaataaaaccagtcggaatcccggtaatatcgcctttccggttgtgaagctgctcaatgttgtcgtatgtttgcacaagcacgtctttaatattttggaaggcgcccgaattttttcgctgcgcgacctccataatcgttttttccgcatcgcttaataaatcttcaacttcatcctcgcgcgtatacccgtcttgagcgattgaggtcgccgttctgattaaacggcggagaatcgatttttcctcaacgattttcgcgtaatattctatattagccgctgtcggaacggaattcgcgatgtccgtcaggtaagagacgcctcccacctcttctaacaaatcggtattcgcaagctctgacgttaccgtgaccaaatcaaccggttcaccgcggtctccgagcacgagcatggcattgtaaattttttgatgtgacattctgtagaaatcatccggaatcaacacttcagaagccagtgttaacgcagacggctgtaaaaaaacagcacctaacacggcctgctcagcttctatgttttgcggcggcagccgatcattcagaaggtctgtcatgctaagcaccgtcctctccttaaaaaatatccaaactccattttaccatttctcaagaaaaagaatagaaaaacatcactttccctgtatttgtcaaacagcggctgcgtgtttcaccattccgaatgccgggaaacaaataaataaatcgaaaccaggaggtaagaaggatgaaaacatatgcagtaacacccaatgttgatgcggacggatggtttgtgaaggttgaaaatgtggcgccgacggctctttatacatcaaaggacgcggcgatcgagaaagcggagcagacggctaaagagaacagcccgtctaagcttgtcatttatgatcagcataaaaacattgaagaagaacgatccttttaagaaaagccttcgcccgagcgagggcttttcttattcgatgaaacggatgtgcagcaccgtctgcgccatgagatcggccgttttttgatacagctcccattcttcacaggcggcgaatactttcatcatgtcctgcaatgtctgtttcagtatgataaattcgtcaattgtccgcagttctgcggcttttttctgataatcagccagcttcagctgtaataacatcaatggcgattgcataaaaaacctcccccattctgttataaagccccgcttttcaaacctccattcctttgtcatatcctcttacgatagatttctgattttagtacaataaagaaacggaaggagtgatcacatgaaaccgctgcaaatttctgccgaaacggcgcaaaagctcgcagaatcactgaatatgccgcttgagagaatcatgcacttgcctcagcacattctgcttgccaaattagctgaagtccaaaaagagaacgatcacaaataaaggctgctctctcatatatatgtgcgggaggcggaagcgatggctttccgcctcttttttcgcggagaaaattttggtaaaacgttctttgaacggaaccgatccgattttaaccgtctcacagctgaaaaaacttgttgacgaaggaaaagtgaaacatttcttattatccggaaacaattcaggcaacacaaagcttgtctcatggatgaaaaagaacggcacaaaaatctcagctgacccatacagcaccggaaaaacaagctcagcccggcaaggaatgacaggcggcccgggcggacaaagtcagcagactctgtatgagatgaaaaaatagttcggaaagaggctggatagttaaacgccggcctctttattttgctcttgaagcacctgccatgcggcgccggtatcattcagaaaaatgattgataaatcctttctatttttgaaaccatcagttcctgacgcagatgccggccggcataggagcgcgcttcttttccaagccgtttcctgagagactgatccgtaatcagcattacgagagcatcagcaagttcgcggctgttgccgggctgacagataagccctgtggcctcatgccggatcatctcagggattcctccgcagtcagttgcgacaatggcttgacctgagaacatcgcttcgatgatcgctatagggaaattatcattcaatgtcggcaggacaaatatagatgattcagccaaaagcgccggcacatcacgtcgttttccgaggaaaaacacatttgagaggcccagtttccgtctcttctcttccagaaaccctctcatgtttccgtctccgatgatccatatatcaactccggataaatggtgccggatgcgggcgagagcgtccagcagcacatcatgtccttttcgctcggtcagacgggaaacgcacgcgatcacgagcttttcagcacgttttgactcaggggcatcctgaatgtgaataccggtatgaacagtcttcagctgggcttccttcgctccgtactccagcaagggctcgtgaaaggagtcgctgattgtaatgattttatccgaagcccgaataccctgcctttctatttcactgaaatatgcctcttctattgaacccttttggattttatgaaacttcatccggcttttcgtaaaatgtccgtgcggcgtgaaaaaaagaggacgctggtacgtttgattaaggtatcccagcaaaaataccgcaaataaatcctgcgcgtgaaacaggtcatattgttctaagtctttctccttcaaaaatctttgaaagacatgtaaatagctgagattcttcacaaacttttcgtttgcggcgccgtatctgccaacaagaaacgctctgatctcgtcagcggcccgcgggatatcttcctgaaaaaaagttggcggcatttggagcggcgagatgacatccgcctgatgaccgatgcgctcaaaacccgtcttaattgatgtgatataactcgccaaccctccgacattcgggtaacggagaaaggttgcgtacagaatacgcaatggcttttttcgtttaggggagctttttccttccgcacagaacgaatacagcatctctggctcaccttgatattcgatcccgtaaaattgatccatgacgcgcaataaggctggaggcaccagaccgttcggcttgccgatctcttctttcacatccgctccccctctctcaaacttataatcctaattcccgtccccattttgacactttgtcaacatgatacggcagcagttcccctccccgattgtcgaagattctccgcaattgggtatgaagccctttttcaagtgttctctgcaaataagccattttataaagcgtcataggaggggtctgaaaatgaatgccccgctttttcatttctttcgtatacacttttacgcaatacgtccgaatatcttctgcgtgccggctccaatcttttctgaagccaagcagaatttcaaccagcaccgtcatatcaaaccaaaccggcgcgtattttgcggattcccaatcgatgaattgaatatcccacggttcatgtccggtcgcatcgtgggtgcagatattctgcatatgaagatcaccgtgtgtgatggctgagccgttttgtatcaattcagggaaaaaatccggctcctcctgctcaagcaagtttgtgatttgccgataatgaggcttcacgatatcttttgtgcgctcatctttaagagccctatccaataattccgctgtctttttgatctgctttttacgcccttttctcatggtttccgatccgtataccggcagccacgaccgccatttaccgtcagaaatattcttgttttcaaaggtgcggctgtgcagttctgcgacagacggaataatatacttgaaatgcttcgggtgaaatgtaagctgtcccctgatctggctgacaaactccataaatatccacgtttcatggtcactttcttctataagatagatatccggcagcaaattccctaaaacggaacgggctttcccgtatatattaatctcgaccttgtttttttcacgggaagatttatataccttcaatatcagcggaacaatgccggattttttctttacaaacagtttataaatggcgcttctgtccgtcgatttcaggcatgagatgtcatccggattcaccgcagacctttcaccgaacgaatacgacagtttttcgtcaattctcagtttttgaaatgcgccatacaaaatctccttttcatacatgccgatcttccttccgcttccgtttccagctgtttttgagatgagaccaagtgtttctgataaatggcatcgggtcattccaagcaaaaagagcgtactctttttttcctttacaccctttccaaaaatcccggaacgtcatttctcctctttttcgtttcttcaaaaatgttaagaaataacgcacctcataaatccagttgattccgtctttttgttcgagctggggcttcacatgttgtccggtcaagtacagatagtacatgtaaacgaaatgaacgcctgccggttctgtcaggctatggctgagccaaaagcgcggattaatttcgataaacttgtaaacattgtcccggggatcctttttaaattccgccatgcctactcccttcagttgaatcgcttcaaaaaacggcagggtcttctcgattaaatcaggaagccgtttgctgacgacgtgggcccccgcgccaaaatcagcagggaattgatggttcttttgcagagagaataggcccattaatttcatttggtcatcataaaaagtggcgactttataaaaacactggttgtctccggggatgatctcctgcacgagcagttctccattttctctgtaggagctgaactccttgcgcaattgtgcggcatccttcattacaattgcttttttgtttactttttttctgtattcatggccggccaccggttttaaaatacacgggaagtcaatattggcgatggcctcttccagctcatcctgattgttcggaaaaaaggttttcgggcaggggatgtgatgcttgaccgctaattcatatgctttgcttttatctaaaaccgtttctaacagagagcggctcgggagcaaaaataaaaaaaagccggctaatgtctcgcggaatttagatataaatcccgcataatcatcagatcctgcgtacagaaccggctttgcttggaatcgcttcccgaaatcagtcagaaatgtcagcagttcttcctcttgtgttaaagggctgggacatatcccgcaatctgccaatcttgattttccgatacgataaggtccctccgtgtcaaacgcgtaaacatcgattcctcttcgggccaggctgcgaatgatcccaatcccgtttgcactgaaatcaagtacaacggctgcatgttcatgtttcatgatctccctccgagctgttggtattttgataaatcgattcgatattttttatcatcgtctcactgcttaaatatttctccgcgtaggcctttgcgtttgaagcagccttctcccgcgcagatttgttagagataaaaaacgctaaagcccgggcaagaacctttgcatttcccggctcgacaataagccccgttttgttatggcggatcagatccggaatacccccgcaatcggtcgcgatgatagccgagccgctgaacatcgcttcaataatcgaaataggcagactatcattaatggtcggcagtacgaatatgtccgtcatattcaaaatagcgggaacatcatctctttttcctaaaaaggagaccatagatagattcagttttcgagcctgttcctctaaggcgctcctcatctctccgtcgcccgcgatcagcacttcaacatgttcaagtagatcagacggaattcgtgaaagtgcgtcaagcaaatgattatgtccttttctcgggcctaatcttgcaatacacgagatgatgatcttatttttcggtaccggggtttttcttttcccgcctgtttttgcatcgtaatcgattcctgtgatcaccgttgtcatgtctttctgttcggctccgagcttcatgagcgggctgcggaacgtatcgctgataataatcaggcgatctgcgtattcaatggctttcatctctagttttttataataaaactcttctaccgatccttttttaaagatgtgaaatttaagtctgttgaaagtaaacatgccatgcggtgtaaaaaacaaaggtttcttatagatttgattgaatctgcctaatatattggctgtaaataaatcttgagcatgaagcacatcatatttttccagatgaatcttttgaagcatttgctcgtatataaacatcagccgattattcttcaaaatatgatcactataatccccgtatctgtcactaaagaaatcttttaatttcggaacaacatccgcccgcagttcttttacctgtgcggaaggaaactgattgggggatatgacatccaccttatgacctctttttttcagtccttcactaagcgttttaatatagtttgataaaccgcccgtgtgcgggtagtcccaaaacgtggcaatcaaaatggataacttctgtttttttccgtataatcgcggaatatgatgtgcatttttcatctgagtctttaccgccgtctttttttgagggcgcgctttgaccccgtagtagcggtcaagcgtctgaatcatatacggataggggacggaaaatgtcttgatcatttccagatcctccgcacgacttcaaaagcttcggcgtattccacacccgccgtcatccctctgactcttcctaaatgttttacgccttcatatgaacggggatgagggtaatccctcatttctacgtcatagtggtgaagcgccgcgagtttggcatccattgtgtctgtgatgttaacgaagtaattaggcttgaagagtttatcagccgtattcctctcccactcgcttgaagatagcgtttcaaacgtaagcagttcgataggcttttgattcggaagcggtctggcggctgttaaaactgcttggaatgttctctggtgatccatattgatatcgccgtaatgatgtgtaaagattttttcaggctgatagacgcgaatgagctgctctaattctttgacaagcttatgaagagggatacattccagctctaaattcgtatgctccaaaaagatgactttctcaattccaagctcttgattcgcgcgttcgcctaattgtttaatatgatgagcttcttcttttcttcctaatgccgtaataatggaaatcactttatatccttcattgatcagccgttttatggtgcccgctgctcccaatagttcatcatcgggatgagcgccgataaccataatatattctcccattttttccacactccaccaaacaaatgttacaaatatcatatgacgaccctaaaaaaaggaaacttacatatgcggattttcagaaacttacaattcccttcgccattcccggtagcgtgacggctttaatttttttatggtgttcaaaaactcatccgccaagccatatttgtccagtccttttaatagttttacgggaactcgggtaacggtcgaaaaggctcttttatggtcgatcactttaagttcaccttgttcgttgatcagaatatgcctgatttcggcatcccatctggcaaaaccgatatcttttaattcatccagcatgtttaaaatatcagctgtcagtttgacggacagggatttttcttttttgatatggcgcgcaagggaggtgcctttgacgtattccatcacaatataatgatctccgtattcatacagtttcgggatcaccggtgaaccatatccgagctgtaaagcttccaattccttcttacatgtctcttttttaaaaaaatattttacgcatttgttgtgtgttaagcgatagacctccccgtcttttccgtctccgatcagcggatagtgtttcagcgcttttttattctccggataattaaaatatgtttcagaaaaaaatcgtttcataccgacacatccttcgtcatgatgtaatataatattcaatccgtaacgatcggaaatgaaacaatctcatcattttcttgcgctgcgacgtctgctgacatgaaaaaaacccgccggatcggcgggtttttcattgtgtattacgcttcttcttttacgtgaaccttcagcacagcctgaacttcagggtgcagctttacaggaacgtttgtatatcccagtgtgcggataccgtcttggagctccagtttccgtttatccactttaatcttatgcgttttttgcagcgcttctgcaatctgtttacttgtgacagatccgaatagacggccgccttcaccggatttggcactcagctcaacagtcagctgttcaagcgtttctttcaaatctttcgctctttcaagctcggcaatcgcttcttttttctctttttctttctgtcctttcaatgcgctgatgtttgtcgcatttgcttcgacagcgaggccttttttaatgagaaagttatgtgcataaccgtctgctacgtttttcatttcgcctttttttcctttaccttttacatcttgtaagaaaataaccttcatctctgaacgcctccctcaaaatattcatcaatggcttccttcagccggacgagcgcttctgagacagaaatgcccgataactgggttgccgcattggttaaatgccctccgccatccagcgcctccataataatctgcacattgacctcgcccagcgatctcgcactgatgcacaccgtatgctcatcccgtctggctaccgcaaatgaagcttccacttcactcattgataagagggaatcagccgcctgcgcaatcagcacctggtcaaagtactcctcttcgttctcaggaagagaagcaatcgcgatatgttctttataaagagacgtatgctggatcagtttcgcccgcttgatataagaaccgacggattctttgagaactttctgcaccagaaccgtatctgcgcctttcgctctcaaataagaagcggcgtcgaacgtccgcgagcccgtgcgaagggaaaagctcttcgtatccactattataccagctaacagggccgtcgcttcaatcatattgattttgagccgcttcggctggtattcaagcagctctgtcacgagttctgcggtggatgaagcgtatggctccatataaacgagcagcgggtctttaataaattcctcgcctctgcggtggtggtcaatcacaacgatgtgctcgattttgttcacgaggcgctcttccatcacaagggacggtttatgtgtatcaacgacgacaagcagcgtgtcatcatttgaaatttccatcgcctcttccggcgtgatgaaccgcgaccacagctcttcatattttttaatttcttcaatcaggcgctgaacgcttgatccgatctggttcggatcaatgacgatgtagccttctttgccgttggcctgcgccaccttcaatattccgattgcggctccgaccgcgtccatatcaggaaatttgtgccccatgataatgacattgctgctttctgagacaatctccttgagcgcgtgagaaatcacccgggcgcgcacccttgtgcgcttctccatcggatttgttttgccgccgtaaaatttcaccttgccgttcggcattttgatcgccacttggtcgcctccgcggccgagagccaaatcgaggctggactgcgccagatctccaagctccttcaaggaagaaaccgatgcgccgatcccgatgctgagggtcaaagatacagtgtgaacggatgttttttctcgaatttcatccaaaatcgaaaatttcgcgttttcaagctccgttaaaatgtgttcatttaacaccgcgataaaccgctccgaggacgtccgtttcaggaaaatgccgtactcctgcgcccacgcatttaataatgaggtgacctggctgttcatcgtgcttctcgtttggtcatccagcccctgtgtgacgtcatcatagttatctaagaagatatatgccagcacggttctctcattttcgtactgcttttcaatctgaatctgttctgtcacatcaaagaaataaagcaggcgctcatctcttttaatcactactttaaacttccgctcattcaaggtgatcgtttccgaatcgacctcctgcttgatcagcggcacaacggcctcgcatgtgtcatacagcgagcgtccgacgagcgtgctttcattaaaacaggaagacaaaaacggattcgcccactcaatgtaatattgatcattaaacagcataattccgataggcatttccattaatgcctcttcgcctacttttttcaatctatacgataacgtggagatataatcgtcaatttcttttctgatcagagaatccgcacgcttaatgaaaaacaagatcacggcgagcagtacaacgccgatggctcctatcagccagttaaagtaaatgctgatgagaattatgatgattgacaatgcaatcaatgcatagatgggataccgaaacaacggtttttcataaaaactaggcatttctatcaactccccacctgtaagtcacactcaatttcgcgtcaccttatttcttatgttaaagcctatgtcaatgatgcctaagaggagatacacggacaagatgagcggaaaaagcacccccagcacaattgctaatacaggaacggctttcggcatctccatttcgcggcaatagaaaaaaataaacgctaatccttgaatacaaatcagcaagctgagaataaatcccccattcaatgaaaccgaatacagcatatgccctttttctaaaggcagaaaccctaatatcgtcacaataaaatacagaatgacaacgctttgcgggagtttgagctctctaaaaggcttcatcttcggaagatcaggggaaaatcgccgtaaaagcggccttgccatagcataactgaggaaagaaaaaacgatgccggtcaatacgagcactgtcggaaaaagatattgaaccgtgctcagctgactttccatcagcttgatctgcttcccgaactggtctccgtaaccgagctgttttgacatggtatcagccacagacagcgactcccgaagctgggacatggtggtatcaaccacattcatattaagaaacacgatgctgaccacaaaaaaaacgacgccgcacagcacatacgccatagcgccggcagcaaccgcatagccgggctgtttctttttaaaataatatcccatggcgattcccgtacaggccgccgtaaaagcgcctgtaagcccggtaaacgaacttacaataaagctgacaggaaggctggcaagccccatccataccccgggcttcagaccgtgccgaatggtgtaaagaatgatcggcagcggcaaagcaaagagaagaattgcccccagtaaagggaggtacacgaccaaaagggaaatgattgcaaaaatactgatcaaaatggcgccttctattagagcccttgtatttttcacttactcacctcaaaccttgtatcattcgaacatacgaatagaaaagagcagcttagacgactgctcttttgacgccgcaatgtctctttcaagacctgaattttccataaactctccaaaatacacgtatatattttaacataagtcgaaatcgcaagtaaaatgagcgcggacagccgcaatgttccatgtgaaacatgaaaacagacaaacggacatcccagtgaaagaatgcccgttgtatcagtgatcctgatcatccatgaaaccagaagtatctctgtttttctttttggtttttcgtacatataacaagacgataacgataagtaagagagtggtcgcctgcaaaaccccgctgctgaaaaggaagaagttctttatcatgtcccacatatagtttcacctctatttcgtatttcctttacattgagtttccctttctggaaacttcaaaacatcaggaacaacatcgggaccggggcatatgctgaaagtgaaaatgaaggataaaggagattcttacaccatgactgagcggagaacattagcatggcatgaaacgttagaactgcatgagttagtagctttccaggcaaacggacttgtgaaattaaaaagaacagagcgggacgtaagcgatgccagattaaaacagctctacagattttccatccattcgctggaacaaaatctgcgtgaactgcttcctttcttccctgaagctcccgcttttcgtgaggatgaaacagaagagcgcgctgattcctccttttacagcggcggcctgctcattctggccaaaacatctgtccgcaattatgccggagccattacagagacggccacacctcaattaagacacgtcttcgtcaagcacttaaacgcggccatcaagtggcaccaaatggtctttgagtatatggaagaacggggtcaatatccggcttacaacctgagcgaattgctgaaaaatgatgtacgcaatgccagaaaagccatcgcgatgaaataaaaaaaagcagcaaggaatttaatcctttgctgcttcttatttttgagcggactgatcttgaggagacgttttttcccggtatgcctcgagaaactcccggttggcatctccccatttcttcatttgcaaaacgatcggttccagcgacctgccgaattcggtaagagaatactccacctttggaggcacctgctgatatacctcccgatgcacgatgccgtccgcctcaagctcgcgaagctgaagcgtcagcatacgttgcgtaatgctggggcaaatgcgccgaaactcattaaaccgcttttttccgccgatcatatgataaaacaaaatacccttccactttccgccgataacggaaagcgtcagttcaaccggacaaccttctttattcggatatatgttcatttttcatcctccatagtaccttttttgatactatatgctgattagcatctgacttacccagtattttactcgcaaccctccccacctctcaacaaaaatgcttctttttcacatcaatttttaaggttttgaagattacaccctcctcaagacgtgttaaactataaaaagattgtttacactacaaaaaaggacaaggagttattatggaaaaaattcttattttcggacatcaaaacccagacacagataccatttgctctgccattgcctacgctgatctaaaaaataaactcggctctaatgctgagcccgtccgcctcggacaagtcaacggcgaaacacaatacgcgcttgattattttaagcaggaaagcccgcgtttggtggaaacagccgcaaacgaagtaaacggcgtcatccttgttgaccacaatgaacgccagcaaagcatcaaggatatcgaagacgttcaggttcttgaagttatcgaccaccaccgtatcgccaacttcgaaacagcggaacctctttactaccgtgctgagccggtcggctgtacggctacgatcttaaacaaaatgtacaaagaaaataacgtgaaaatcgagaaagaaattgcaggcctcatgctgtcagcaatcatttccgactctctgttatttaaatctccgacttgcacggagcaagatatcgcagcggcaaaagagcttgctgaaattgccggcgtagatgcggaagagtacggcttaaacatgctgaaagcgggcgccgacttaagcaaaaaaactgtggaagaactgatttctcttgatgcgaaagagttcacgctcggcagcaaaaaagtcgaaatcgcccaagtcaacacagttgatattgaagatgttaaaaagcggcagccggaattagaagcggctctttcaaaagtaattgctgagaagaaccttgacctgttccttctcgtgattacggatattctggaaaacgattcccttgcgcttgccatcggtgatcaagcgtcaaaagtggaaaaagcattcaacgtgactttagaaaacaacacggctcttttaaaaggcgtcgtatccagaaagaaacaagtcgttcctgttttaacagacgcgattgcagaataaccaacacaccccggaaaccagccggggtgtttttttattgctcattcatcagacggccgtttcgtaagcgctttcccccgaaaatcattttgacggaatttaatatacaatatataatatatcacatggaggacgttcatttcctaattattgttagttactatcacaacgtcagaatcgggggtgtctatcctggaaaaacacgctgctctttcttattcacgaacaacaggcatttggcttgtgctgacaggagctatcttatggggggtctcgggaacggttgcccagtatctgttccagcaccgccattttaatacagaatggctgacttcagtgcgccttctggtgtcaggggcgcttctgctcggcatcgcgtaccgcaaagaaaaaggacggatatgggctgtttggaaagacagacgggacagaattccccttcttttattcgggattttcggaatgttaggcgttcaatacacctacttcgcggcaattgagtacggcaacgcggccgctgcaaccgttcttcagtatttagggccggcgatcattacatgctttttagcgattcgcgcaaagagaattccttcagcaaaagagctgctcgccgtcttattggcggttgccggcacattcattttggtcacgcacgggaatgtcggaagcctgtccatatccggtctggccgtcttttggggcatcagttcggcgtttgcactggcgttttacacccttcagccgcatcgtctgctgaagaaatggggatcggccattattgtcggatggggcatgctgatcggcggagccgccctcagcttgatccgcccgccctggacatttgaaggcgagtggtcctttcctgcatatgccgcgatcgtgtttatcatcattttcggaacgctcatcgctttttattgctacttggaaagcctgaaatatctgagtgcctctgaaaccagcctgctcgcctgtgcagagccgctgtcggcagcttttttagctgtgatctggctgcatgttcccttcggaatatcagaatggctgggtactttgctgattttagccaccatcgctttattatctatcaagcaaaaataacctctcttttttagagaggttttttcctaggcccagagcaccccttagtctcaattacccatatattaaaaggccttttttcattttactatcatccaaaagaggaaaatagaccagttgtcaatagaatcagagtctaatagaatgatgtcgacaagtaaatcatgcaggattgttactgataaagcaggcaagacctaaaatgtgttaagggcaaagtgtattctttggcgtcaccccatacatattttaggtctttttttctgtaacaaacctgccatccatgaatgcaggaggatcgaatcggcagatcgcaaaaaaaggtacatacaaaaggagacatgaacatgaacatcaaaaaatttgcaaaacaagccacagttctaacttttacgactgcacttctggcagggggagcgactcaagccttcgcgaaagaacatacccaaaaaccttacaaagaaacgtacggcgtctctcacatcacacgccatgatatgctgcagatccctaaacagcagcaaagtgaaaaataccaagtgcctcaattcgaccaatcaacaattaaaaatatcgagtccgcaaaaggactggatgtgtgggacagctggccgctccaaaacgctgacggaacagtagctgaatacaacggctatcacgtcgtgtttgctcttgccggaagcccgaaagacgctgatgacacatccatctacatgttttatcaaaaagtcggcgacaactcgatcgacagctggaaaaacgcgggccgtgtctttaaagacagcgataagttcgacgccaacgatgaaatcctgaaagaacagacacaagaatggtccggttctgcaacctttacatctgacggaaaaatccgtttattctacactgacttttccggtacacattacggcaaacaaagcctgacaacggcgcaggtaaatgtgtcaaaatctgatgacacgctcaagatcaacggagtggaagatcataaaacgatttttgacggtgacggaaaaacatatcaaaacgttcagcagtttatcgatgaagggaactatacatccggcgacaaccatacgctgagagaccctcactacgttgaagacaaaggccataaataccttgtattcgaagccaacacgggaacagataacggataccaaggcgaagaatctttatttaacaaagcgtactacggcggcagcacaaacttcttccgtaaagaaagtcagaagcttcagcaaagtgctaaaaaacgcgatgctgaattagcgaacggcgccctcggtatcgtagaattaaacaatgactacacattgaaaaaagtcatgaagccgctgatcacttcaaacacggtaactgatgaaatcgagcgcgcgaatgttttcaaaatgaacggcaaatggtatctgttcactgattcacgcggttcaaaaatgacgatcgacggtattaactccaacgatatctacatgcttggttatgtatcaaactctttaacaggtccttacaagccgctgaacaaaactggtcttgtactgcaaatgggtcttgatcctaacgatgtaacgttcacttactctcacttcgcagtgccgcaagccaaaggcaacaatgtcgtgatcacaagctacatgacaaacagaggcttctttgaggataaaaaggcaacatttgcgccaagcttcttaatgaacatcaaaggtaagaaaacatccgttgttaaaaacagcatccttgaacaaggacagcttacggttaacaactaataacaacaaaaagaaaatgccgatacttcattggcattttcttttatttctcaacaagatggtgaactcaatcatggcacgaaaatggcccgttgtaatattgatctttttgggtgcgttcctgtttgtcggcttactgccgaacaaaagccacaattcctctgacacaaacacggagcataagaaagattaccgtgcggcgtatcattttacgaccccggacaaatggaaaaacgaccctcaaaagcccatttttttcgaggggaaatatcattactactatctttataatcgggattacccgaacggcaacggcacagaatggcggcatgccgtatcagaggacttggtgcactggacggacgaaggcacggctattccgaaatacaccaacgaaaacggcgatatatggtccggttctgtcgtcattgataaacacaacaccgcgggcttcggcaaaaacgcgctggtcgccgtcacaacgcagccgacagccaaaacaaaagcccaggaacaatatttatggtacagcacggacaaaggaaaaacgtttacttcctatagtgatcagcccgtgatgaaaaatccgggaactaaggatttccgggacccgaaagtgatctgggatgaacaggatgacaaatgggtgatggccatggccgaaggcgaaaaaatcggtttttatgaatcacccgatttaaaaaattggacatacacgggcggttttatcactcagcagatcggcctcgtcgaatgccccgacctttatatgatgcgtgcagatgacggaacagccaagtgggttctgggcgcaagcgcaaacggcaaacccgcaggcaaaccgaatacgtacgcgtattggaccggaaactttgacgggaaggaatttacccccgatcaagaagaaccgcaatggctcgattacggctttgactggtacggcggcgtcacatttgaggacggtaatagcgaagatccgctgacaaaacgctatgcgctggcatggatgaacaattgggattatccgaatgaaacaccgacactaaaaaacggctttaacggtacggattctatcgtccgtgaaatccgccttcagcagcaggaaggcggcacatacagcctagtgtcagagccggttgaagcattgaaccaattaacctcttcaactgacagcatagaacacaaacaggtgaacggttcagagacactgccgatcaaaggtgacacatatcagcttgatatggatatcgcttggtcagatatcaaaaatgcaggcgtcagactcagagaatcagcagaccaaagccggcatattgatgtcggtatttcagcagaagacggctacgcctatgtgaacagatcgtttacagaccagcctgataaaaccggtgcatacgccgaaagcaaagccccatttgacggaaacaaagggcgcgtccatctgaaaattctcgtggataaaacaagtattgaagtatttgcagacgacggaaaaaccgttttgacaaatgaagtgttcccaaaacacgaagatcagggaatcacgctcttttctgaaggcggctccgctgactttcagcatattgagatgaagcatctcggttcgattcattcttagacgtccctcttcatttctaaccagcgcccggactgtggtaaaatgcaaatatgtatactacgattcatgaggtgttccattggataatcaaaacaaagaacctgtgctgaaaagaaccatcatgcgggacgaagtgtatcgcacactcagaaactggatcataacgggcaagctcaaaccggaaacaaagttaaaggacaaggatttgtcggaaacattgggaatcagccgcaccccgatacgggaagccttattgcggctggaagatgacggcttggtgataacaaaagcgaacagatggacgcttgtcgctccgattgagttaaaagaagcggaaaacttgtattccatcgtctggacgcttgagaaactcgcattgcagcaagccctcccgcgtatggacgatgccgtgattcaagaattgaaacagctaaatgaaaatcttcttcaaacgatgaaagacggcgataaactggccgttctggaagcggacaatgcatttcaccatcgcatcattctgcttgcggacaacgctgaacttcacaaattgctagtaagcctgaaagtcaaaattcagagactggaaatccgctatttcagtgaaaacggcgctttaaacagatcatataatgaacactctgatatcattcacgcattagaacagcaagatgccgccgctgcttttacagcgcttgaagcgaattggaaaaacagtttagaacggctgcagaacatggcatagcaaacgaaaaagccaaatcactcatatgatttggcttttttacggatatcacaagacagccgcgttggctgtcttgtttactttttgtttatatataaatacataccgtaatccgtcggcacagaagcataccccatctgtctgagcatggctgttatattcccgcgatgatacgttccgtggttcacaacatggaggatcatatcggccgctgcggttttcatgatgtcacctgacggatgctctatttcaagggggagactgatattttcttccttttgcaaaaataattgataccggtctgataattccaaaaacatatcttccagctcttctatctctttagacaagatgtcctctttttgctgttcagctgatttcagcgtatcctccagacgctctccggagaacacatcaaaccaccccttatccgacagatacacatgagtcaatacaccggctatcgacggaaagacactttgaatctccttacggtacacatcctccggaagctctttaagccgggtgaatatttgctgatttgcccaaagatgataatcatacaattgcagtgccagatgtcccacattaccctctcctctctcgatatatagaacgtacgttcctcattatactacactacatgcggctttgtaccaatttcttcattcgcagctgagaaaatccgataaaagccgaaattaataagagaaggcctgcgccgatataaataaaccgcacgccgaatacatccgagataacccccgttccgataatggaaaacataaaaatgaactgaactaaagctgatctcgctgctagtatattgacccgtgtcttttcggtcgtgatgttttggagtaatgtttcctgcgagagatctcgtaatacacaagccggccccatacacagcaccagaaaaagggccgtaacggcgcttgtgatcaacccataaataaacgtgaacattccatatgccaaggctcccgtcagcataagcggaatgagatgatgctgaaacttgccggataacttgtagatgatcagtccgccgatcatcgtccctgcataatagactccgttgacatacccccaccaagcctctcctttatgaaggacgtcatgcacataagtcaaggacacagacccgatccatatcatgcctgcccacgattcgatcacatccatcacaatgagaaccctgagctgtttttgctgaaataaatacacccagccgcttgccgcatctgcaaaaagggaacgttccctgactgctgccggcgcacacatgcgtacttgaagaaacagaatgatgcccaaaaccgaagaaaccaataacatgacagtgacgatcattgtatcgctctctcccaagaacgctatgatgacgccgccgagagaccaccccgcaaactgaacggtctgatccgccgcagataataaaccgttcgctttcgcccttcgatcaggaggaatgatttccccaatcagcgcgctttttatcggagcaaaccatccgttgcaaaaagaaatgcctccgatcagacaaaacatcagaaaaaagaatgcggatgaaccggtttggatgacaaaaaacaaacagactaacagtgtgatctgaatcaattgagaaccgattaacaaagaacgaagcgtgaaccggccggtgaccagcggcaaaacggcgctgcccaatacgcgacatacaatgctgacgaacgtcataagagaggccatcgccgtcgaaccggtttttgtaaacaaaaacaagatgacagccatcgtataaagtgagaaccccaagttgatagcggtctggctgtataaaatagcgtaatacgctctcttcatattcatcctcagcaacctcactccccaaagccgaagcgcgcaggcatcggcttattttttcgtttactttctctccttagtgggaggctttcgtatgtcaggctctcacctttaatttgatctttctgccttccgaaaaagtaatcatgcttaggacaatgtaacagcctatccactgtatccatgttaagcgctcgcccaagaaaaaagcgccaaagatgattgtgatgatcgggcccatcattgaaatcaaagaccctcttactgccccaatccgtttgataccttccagcataaataaaaaaggaacgactgttgtaaatacagcaatgattaaaaaaaggaaatatacgggtggctgaaacgaccatagctctgtctgatagccaaaaccctttcttgcgattaaaaaaagcaccatggcaatgcttgctaaggacatcccatatgcattcatacggatactccctactttgcgaacaagctgaccggataagaccaaataaagtccgtaaaccgcggacgacagaagaacgagaaaagcgccaaatatattagcactcaattcgtgcaggttccagccgccaatggaaaaaaagattcctatgctgaccacaacgacagaaatgatgtctgcagcggttattttctccatttttccgaaaaacgagataatcatgacaaaaatcggataactcataacgagcatcctttctacaatagctgaaacataatgcagcccgataaagtccaacagcggagatagaaaaaaaacgagcagacccgtgattcctgctctgactatatcagcctttgccggtttttcagataattttgcacgatacataagaaaaatgatgcaaaaaagaggggttgcaatcaattgtctgaaaaatagcgttgactccggggtggctccgaatgtgtaagcccacttaataaagatcgactttgaggcaaaacacagcgtaccaacaatcataaacaacattccggcgagaaacggatggtttagttttggcggagtattcacttcgactttgctcatagatttacacctttccttagtgcgaatattatttatttcgattctgcgagcagtttccctttttgttttatatactaaaatgtatttctatcacccgaaaaaaagccgatgcgcgcaggcatcggctttcaaattaacctatcatctcaagaacaagcggccggaatcagccatttatcaggaatgatttttaaaacagaataaaaaaagagggcttcctttccggaagccctcactccgtctgctacgccaataaaagaaaaataagcgctaaaacagccggaagtccttgttttacgataattgatttgtttgaagtaaagcctccgaaaatggccgcgatgaccacacagatgacgaaaaacaattgaatcatatggcccatcggatcagctccgaggatcagcccccaaatgagaccggcagccagaaatccattatacagaccttgatttgcaaacatgaccgctacattccggtcaccttctaaatgcttcggcaatttgaaggaccgcttagctgccttcgaattgataaaaaacatttcaagtatcatgataaatacatgttctaaagctacaattccgacgaaaacagctgcaataatctccactgtcccactcccctcagcttcacttcaaccttatttccattgtgcgattgtttcgataggaagacggtaggaagcatatccttcgtctgccgcttttccgattgataacagcatgaccggtacataacgctctttatccattccgaaaacctcggcaatcttttctttatcgtagccgccgatcgggtttgtgtcatagccgtgcgcgcgcgccgtaagcatcagctgcatggaaacgagtcctccgtcaatcaaaatcgtttcacggttcacttgctccggcagtttttcaaagtgtgccgtcaacgcagcgatttgtctgtcttttacttcctgcggcatgtagcccagttcgaccgcttttgaataaatttcttctaaatagtcatcactgttcatatctgcgaaaaccgcgatcaccgcagatgatgtgctgacttgtgtttggttaaagctggcaagcggcgcgagtttttcttttccttccgggctgtcaatgacgagaaaacgccacggctgcgcgttgactgaagacggtgctgtcgttgcttcttccaggatttgagtcatttcttctttgctgatttttacggccggatcgtaattccgaatggaacggcgccctttcataatgtccataaagtcgtttgttttcagttctgttttcatgtgtaaaacactcctatgctttcatattttctatattattctgcatctgtgacaatacgttttttaacatactgcgttcttcctcgctgacaccggcaagcatttcctttatgaaacgctccttctcctttttggaagcctcaattctctcccgcccctgttcagtaagccggacaagtataattcggttgtcctcgggcttccgccttcttgtgaccatttctttggcttcaagctgtttcaagtgtcttgtcacggctgcgccatcaatattcacctttttctgaagatcgctttggctgatctcatcggcgtaaaaaagcacggcgagaagctcaaggcgggattggctgattccggtgcacgcttcaaacttcgtgccgatcactttatgcagtgattggagctgatataaaatctcgccttcctctgaacaacatgctgtcaaaacccatccccactttcttttgcgcaattaattgactagtcaatgtttgatatatcaataatatacagccgtcattctatttttgcaagttttttctccttttttaaaaaaagctgccgattaacggcagctcgcttcttaatgattatggacttttctgaaattactgccttttacttctgcgacatcatataccgtcacaaaggcttgtttatcaatgtcattaataatttctttcagtttggtttcttctaaacggttgataacacacgtgatttctttgaatttttcatgagaaaaaccgccgtatgcttctttatacgtagcgctccggcccaattcttcacgaatggtctctaccattaatgcaggctcattggtgataatctgaaatgttttagaaccgcttaagccttcctcaaccacatgaatgaccttagacgcaatgtagtaagcaatgacggaaagcaatgcgccttgcagcccgaatacaaaagaaacaaaaataaacacaaacatgtttaaaaataaaatgaggtcgctcgtgccaaacggcaatttccgtgacagaagcacagccagcatatcaattccatctaatgcgccgccgttgcgcaatgccaatcccattccaaagccgagaataatcccgccgacaacggtgattaacagggtgtctccctctatgatagccggtgtgtggtggaaaaaactcgtgcctgcggcaagtgagacaataccgataattgatagaaacgcaaaacctttaccgatttgcttatatcctaaccagacaaacggtatattgatcaccgcaattaagatcccaagaggcaaatgaaacagctgtgaaccgacaatgctgagtccggttacaccgccgtcagatacactattcggaatcaatacggtttccagtccatacgcggcaataattccgccgatgatgaccatgatggcccgtacgattgatttcactctgaatttcttacgtctttgtttttcgattgtactcatatcattccccgcttcaattattttttcttatttaaatataccataattgatacttttcgttaaaaataagcctatcggctatgttgaagcaggaaccgaggaaggagatgtcacagataacgtatccatttatgactttaatcattcacaacgtaatcattcattaaaaggaattaataaccattaataatctcttttattccccttcttcacatattcccaatcatgttctatattttttctcacccgctgaagaaggctgaaaatggtttctttttcctcagatgtaaagccggacagggctacctccgcagaatgctctccttctctttgcaataacggataaacctttctccctttttcagtcggaaacagtttttttatttttttattttgatcatcaggacgcttttcaataaacccctgtatttccagttttttgattgccctcgccgctgttgttcggtcgactttaatcatttccgccactttttcctgtatcactcccgggttttcacatatacgcacaagatagagatactgcccttttgttaagtctaattctttaaattcaatattgctgatggaatccagtgcccgtgcgatcatgccgatttcccgcaaaatatcagtcatatcttttcaaacccttcattttttgttgcatttacaatataattattttatcgttacttctataagaccacaagcaagccgtgcagtccagactaacatgtgaaaaggattggttgattatgaggataaaaagaataacaacggaaattgatttacaagcagcgcttgagattagaaaagcagtattcattgaggaacagcaagtacctgaaaccgatgaatttgatcagttcgatacgcttgaggatcagtgcgggcatgtcttggtttatcatgaaaatcagcctgccggcacaggacgcgtccgcatcgtaaaccatacaggcaagctcgaacgaatctgcatcctgaagccttaccgtaaatacgggttgggcaaagtaatcataagcgaattagaaaacatggtaaaagaaaaaggcatcacccaatgtaaactgcatggacaaacacatgcggaaggcttttatcacaaactgggctatcagacagattcaccggaatttatggaagacggcatcccgcatgtcttgatgacaaaagagctgtgagctgtcactgaatgagcagccaaacggctgtatgaattatttaccgaaagccttgtataaaggctttttttcttagcctgaaactcaaattaaaaggtatgtgtgctcagccggtgcttgtcacaaatgaccgccacaaaaaaatcaaagctggaataaaactaccaatttaagcttttaatctattaaaaattaacagttaaagagattataaaaagggaagaaaatctcaaattatacaagaaaggctgattctctctaatatggactgctgacgcgttacattttttctatcttcacatatctttaatactacgtacgttataaatagattccaggaggagatatgaagtggaagaaacgagtatggagccatcacggctctgcaaagaatttgctagaattctcaattcaacgcccagtgtcgtaaatggcgtatgtacggcgacaagatttcgaagcaacattcatccggtggtactcggaagaagagccgaggcatttccttttattcctcaggccttttcatttgaaagcatggatcgggaaggcagagctttatgtttaggtgagactgttttactgcaagaagaagtgaacccgttaatgagtgagctgcgcaaattcggtatcatcgtaactgccgttcataaccattggctgtttgataaaccgcgtctgatgtttatgcattttgaatcaattgataaacctctcaattttgcaagaaaagtcagagaggccctgagagttctaactactaaaactgtgcgtgcggtaccaaaaactgacggggaaatgattgaacggcatggtctttgtgacgagttcaacgatattctaggcggaaccatgcatacgtttgaaaatggaatttgtacagtaatgagatcacgaacgaatataaaaccagtagtactgggacggcccggaagatcattcttgctcattccgcaaatgttttcatttgaatcaatgacaaaagacggccgtgctctttgcagcggagaaactgtcattctgcaaaaagaaatcaatccatttatcagcgttcttcggaaacatgatctgattgtaacgtcacttcacaatcactggctgtttgataaaccgagactgatgtatattcatttcgaagcgattgataaacctgtcaacttcgccttaaaagtgagagatgctttaaaagtgcttactgataaagaggtcaaagcttagcatgtttcgaagtatcaaaaagcgattaatataatcgcttttacatatgatcaaccgaaaacaaaaaagagaccatatataggtctggcacgacatttttatgataagcgagactattaaaaaacagccttataggctgtcgttttgtgtatattctattgatgagtttatactaattcatcccgcattcctatttctcaatggttttctacatgtcgttgtgcaaacaccttcttagccactgaaagagcattaagtacacgcgggaatcctgtataaggaaccaattgggtgatactctctacaatctcagtcggcgttaatccggatgtaagccctgtattgatatgaagttcaagctgcggctcggttccttgcgttacaagggatgaaatggtaacaagcgcacgttgttgattggttaatcccggtcgtgaatatatatctccataagcaaattctatcatgtacttacttacatctggggcgatatctttcaagtcttcagaaatctttaaatgcgtagagattttatcatcgcttgttaaagtgtactccattaatttgtctaaaccttgttggtaacggctttggtccattcgaatttcctcctgaaaggtacttattttctgacataagataatatatcgcagccctctctaaccgtaaaatacataaaaactataaaaatcattcatttttttcatgagttatcttgatttacgtaattactcttacaaaaaaatgaaatataccggataaattcgcgtactgcgtgtgaaacatatttgcctttttttaaaataatcgccactttccaaggaattgatggattgacaatggaaattgccttaactaaactttgatcagtctttttcactatagactgaggaaaaatggaaatacctagttcttctccaatcatttcgctgataaaatcccattgagaactttcataaacgatatttggacgaaaaccggctctaatacactcttgaataatccgatcgtgaagagagaagtcttcactaaacaggatgaaaggttcatttttcaagtcttgcatttccacaatctctttatgaacaagcgggtgagcggaatgaacgaagagcatcagttcttcattaagcaatggaatgatatcaaactgctcttcgtccactggttcaataaccacgccaagatccagtaccccatcttcaacctcctgtttcaccttgtttcccccatgttctatcagcttgatgttcacatcaggatacaattgtttaaatcctttaatgattttaggaaaaaacaagacaccgataagcggcggtattccaattttcacttttcctttttttaaatgtaaaagatcgtataagttcgtcgacaagtcatctattgacttcataatcatttggccttgctcaaatacaatttcgcctgcatctgtcaaagcgatttgtctagctgaacgatcaatgagctcaacctttaattcctcttccaaacttttcaccatcttacttaagggaggctgtgacaaatgcaaattttctgatgccttagtaaaactgttggatttagcaacttcaagaaagtatgtgatttggcgtatatccatcgtatgatctccattccataagtttaacgaatacattatattctttttattcattttacttatacaactgctgggtgtaaacttttaggagaccaaaatgaattctggaggggttactatgagtaaattattggaaagtaaagttgctcttgttacaggcgcggcgagtggaattggtttagaaattgcacgtgaattcgctaaagaaggcgcaaaagttgtgatttccgatttgaacgaaaaagccgtgcaacatgcagctgaggaacttacggaacaaggatacgaagtcctctctgcggtttgtgatgtaacaaacgaagaacaagtagaaaaatgtgtctctaagacacttgaaacctttggacgattggatattctggtaaacaatgcggggattcagcatgtgtcggatatagaaaacttcccgactgataagtttgaatttatgctgaaattaatgcttactgctccttttagtgcgacaaaaagagtattccctttgatgaaaaaacaaaaatttggccgcatcatcaatatggcttccataaatggtttaattggttttgcagggaaagcagcttattgcagcgctaaacacggtttgatcggtttaactaaagtatcagcattggaaggagcggaatacggaattaccgtcaacgccttgtgcccgggatatatcgacactccattggtgcaaaaccagttaaaagatattgcagagactagaggcatttctaaagaaaaggtgtttgaagaagtcatttaccccttggttcctcaaaaacgtttgttagccgtgcaagaaatcgctgattacgcagtattcctcgccagtgacaaagcgaaaggcgttacagggcaggcagtcgtaatggatggcggttatacagcccaataatctgaatttcatctgcaggagtcatagcgctttggattaaatgatttactcttcaagaaccaagccgatggttttttaggaaagacatagctatacagattgaagtttgatatatatttggtatattaacttaagaaaagccgccctgttgggcttttttactggttttcatgaggggaaaagaagcatttgaaaaagcgaaacgcgaaaacaagccgattcttgtcattgatagcatgtctctttctattaaagtaatcattatatatttatctgcttgccaattccttaatcatcaaacccaattcataaattcccttttgaaggtcttcaagagatgcataagcatatgataagcgaatataattccctttttcttgagcatagatactgccgagattgagaagtatcccttttgtcaaagcttttgtataaagtaatttcatagatagtgaaggcaatatttttacccagacaaagaatcctcccttcggcatattccatatagcgacattcttcaaattggtttctaagagactcatgaccaattgccttctcacctttaattgacttctcacctgttctagatgttgctggtattcaccggatgtaaaccactctgccgctactctctgagataacgaactggagccgtaatctgtttgcatttttatgtcggataaacgttcaatcactggttccggaccgacgatccatccaatcctcaagcccggacttaacgttttcgataaactgcctatgtaaagcacatgcccatttttatctattgttttaataggatctggaggaatctcatctatccataactcacgataaatgtcatcttcaataatgggaagctgtgcattctcacttgccgcaaggatttcttcccgtctcttttttgacattaaaatacctgtcggattatgaaaacaaggatttgtatataagatagccctcccccgttccccccttgccatgtggatctgtctcggcaaaagcccatcgttatccataggaactccagtcagcttcataccggctgattgaaatacgtgtaatgaataaagataggacggctgatcgagaaatacggtcgatcccctttgtaacagccccattgatatcagctgcaaggcttgcagtgcgcccgaaacaataagaatggaagaaggagaagcttgaatcccgattgttcttaaatagccgcttaatgcctctctcaaaggcaaatagccttttggttcctcatacccgaatgcctctatgttttgagatacctttcccatgatctctttcataacagctaaaggaaaaatctcatgtgaaagttctcctttactgagctgtataagatcagaattcgattctgatttattgatctcttgaacgattttttggcttggctgctggattccggaggttacatactgatcccaatcgggggcggaattcttagccaaaagtgtccatgtattgttcgtaacaactgtccctttgcccattctgccttcgattaatccatccgccgtcaattcctctaaagctgtaatgactgtgctcctgttcacctcaaagtgtttagcaagcgtgcgctggcttggaatcttacttccaatcggccattctccatttcctattttctcttttataaattgaatgatttgtatgtacttaggaagctttttcatctttttttcttctggagcgctcataaaaaggatcctccttaaagtggttgggtcaaaatctatttaactggttgaagtcatatcatcaaatctttattaatatagaaacacattaaataactggttggtttttgtaaagaggagtgagaaagatgcaaaagaaaacagttcgaatcggcatagcttacattctgatgattgggttgtgggcatcagctttcccgggaattcgcgcgggtttggagagttacacgccggaacacctcgctttgtttcgcttgttgattgggtcaatggcattggtggtttttgctgttttgactcatatgcgtttgcctgacatgaaggatatccctgctattttatcgttaggatttttaggttttgcactatatcacattttgctgaatatcggagaaaaaacagttagcgcagggacagcaagcttactcgtgaccatgacacctattttttctgcaatgttatctcgtctgttttttggtgaacattttgggctttataaatggattggctctatcattagcttattcggtgtatcgtttatttcatttggggcaggagactatacaaattcagtgaacggcattttgttaatcctgctggcagctttctcggagagtatttatttcgtttttcaagctcgctatataaaaaaatatggatttattccatttgttacattcactatttggggcgggacaatacctatgcttgtatttctgcctggcttaggggaagagtttttgaacgcttcaatgaactcaacattgtcaatcgtttacttaggtttattaccaacggttgtgccttactttgcacttgcgtatgtaacttcactcgtcggtgcttcagaagcagccatttcactttatttaacaccagccgtagccttggccatttcttgggtgtggttaggtgaggtacctgcgtttattgcactgacaggcgggatggttacagtcgccggagtgtgtttcacctatctaacagtaaataaaacgataaagattttaaatccttacttcttatctaaaaagcaataaggtagatgaagtttaaccctgaaaatagagtcataagcagttctcctttttaatgacttgggtttggttcacaaagttgagtgtatgaatttttttagaggattgtggtatgttaaacatacaaatattaatagaaagcaggtgagcccatgccaaacaatagcaaacccaacagtttaatcatggagaagtccccctatctgctccaacacgcccacaaccccgtaaactggtatccttggggagaagaagccttcgaaaaagcgaaacgcgaaaacaagccggttcttatcagcatcggctattcgacgtgtcactggtgccacgtaatggcccacgagtcctttgaggacgaagagatcgccggtatattaaacgataaattcatagcaatcaaggttgaccgcgaggagcggcctgatgtggattccgtgtatatgagaatctgccagctgatgacggggcagggcgggtggccgctgaacgtgttcgtcacaccagatcagaagccgttttatgcggggacgtattttccgaagacgagcaaatttaaccgcccgggctttatcgatgtgcttgaacatctgtccgaaacgtttgcgaatgaccggcagcatgtcgaggatatcgccgaaaacgccgccgctcatcttgaagtcaaggttcacccggccgagggcatgcttggcgaacaggcggttcatgacacgtatcgccagctggccggcgggtttgatacagtgtacggcggattcggccaggctccgaaatttccgatgccgcatatgctcatgtttctgcttcgctactacagctatacgggcaaggaacaggctttggccggcgtaaccaagacactcgacggcatggcgaacggcggaatttttgaccacattgggtacggctttgcccgctactcgactgataatgaatggctcgtgccgcattttgagaaaatgctgtatgacaacgcccttctcctgaccgcatatacagaagcctaccaagtcacgggtaatgagcgctacaaacagattgcgatgcagatcgtaacgtttattcagcgggaaatgatgcatgaagacggcagctttttctcagctttagacgctgataccgaaggccgtgaggggaaatattacatatggtccaaaaaagaaatcatgaatcttctcggtgatgaactcggcccgctttactgcaaggtgtataacatcacagatcaaggcaattttgaaggcaaaaacatcccgcacctcattttcacgcggcgtgaggccatcctcgaagagaccggccttaccggacaggagctggccgaacgccttgaagaggcaagaacaaaattgctggaggcccgtgaaaacagaagctatccgcatacagatgacaaagtgctgacctcatggaacgcgctcatgattgccgggctggcaaaagccgcaaaggtatttcacgagcctgactttctcagcatggcggaaacagcgatccgctttctcgaacgacacctcatgccggacgggcgcgtcatggtccgctatcgcgagggcgaagtgaaaaataaagggtttatcgatgattacgcttttctcatctgggcttaccttgaactgtatgaagcgggttttaatccgtcttatctgcagaaagcgaaaacgttatgtacaagcatgctggagctgttctgggatgaacggcacggaggtttcttctttacggggaatgatgccgagacccttcttgtcagggaaaaagaggtttatgacggggccgtgccttccggaaacagcgcggctgccgtacagctgcttcgtctcggccgcctgacgggtgatatatcactgattgaaaaagccgaagcgatgttttccgtgttcaaacgggaaatagaggcctatccgagcagcaacgctttcttcatgcaaagcgtactggcacatacaatgccccaaaaggaaatcgttgttttcggaaggaaagatgacccggacagaaaacgtttcattgaggcgcttcaggagcatttcactcccgcctatacgattctcgccgcagaacatccggatgagcttgccggcatttctgactttgccgcgggttatcaaatgatcgacgggaagacaacggtctacatttgcgagaatttcgcctgccggaggccgacgacggatattgatgaagcgatgaacaccttacaaatcagcagcagagcctaggcggcctgctgcttttcttttttcacaaaacggaatgcgagccatgcgaagatgatattgatcaccagagtcgatatgcaatcatatatttcatagccgccggctgctgttgtaaatatcgacggaatgccgccgtacaccgaatgatcctctgtgagaaagataaataaaaacatattattggcagcgtgaccgccaagagacatctccagactgcccgttttaatcgtgataaaggtccagatcatgccaatggtgacatatccgattcccgcccagagagctccattttccatttccggatttccgaaatgaagtgcgccgaataatccgccgataatgactgtcagaaccaccgcgtttgccgtcaattttccggcgaactgaagcagaaaaccgcgaaagagaaattcctccgcagaggtttgaatcggcaccaacaagacggccgccgctaacagcagcagaaaacgtgaagcatggaattcctgaagcatgaaacgatccggatgaattgtaaaatcaatcagccccgcgacaaacatcagcacaacatatgtgccgaatccaaagaaaatcctcttccagttcagcgactgattcggtgtgatgatggataaaaaccgccgtttcataatgaaacgaactgctatccaaatgcccggaatcgctatgaaatagacgatatgctgtaaataaatatccgccagcgggtcacttaatgccccctcatcccaatttatcgtcagtgaaggattgaaagcggacgtgagaaacatataaaacacggtcagtatgcttccgaaaaagaacaaacccacaatgaccaacagagaaagaatatatctcgatacactattttttccctctgtgggccgtacaaacgtattcatatttatgcatcaacttcctttccttcaacattttacaatataaacagaaacagatataggaaatgttatatgttttaagaagaaagcgctatgccgtttcctttggctctggttatttacactctgtttttgccaaaaaaagacctttataatgtagtcgtcagataaattcacagtattttctgattacaattgcaaagtcagggggttttttatgaaacatcagacattctcaaatgtagcgaaccgattagaccgtctccccatttcacgtgtgcactatcaagtattaaccgctctcggaatcatctatttttttgatctcgctgatctgtttacgctcagcaacgtggctccggcgctgattgagcattggggcgtgaagctgtccaccattgccgacatcaccgccgcatcattcctgggcatgtttttaggcgcgtccatcggcggaaggctgtccgatcggatcggcaggaaaaaagcgctgaattgttttgtccttgtcttttcgatctcatcttttctgaatgcgctggcatgggacattccgtccttaatgattttccgcttcttgaccggtctcggcgtcgcggccgccatgattgtgacgaacagctatttggcggaattttttccatcctccgtacggggaaaatacatctccctttgcgccatgatcggactgatcggcgttcccgtcacaaacgttgtttccgcttttgtcattcctttaggctcatgggggtggcggctcgtattcatatggggggcggccggtctcatttatttcttttttatccgccggcttgaggaatcgccgcgctggcacgaaaatcggggcgcatatgatcaggcaaacgccattatgaaccgtcttgaagcacgtatagagaaagaaaaaggcccgcttcccgtgccaaaagaggcggcagaagtacatacagtgaagcacgcaggctacttagggctgtttcagggcaggaatttaaagatcaccatcatcctgtcagcggtatggattcttgaaacctttggcttttacggctttgcttcatgggtgcccagcctgctgaaaagcaacggcatcaccatggaaaaaacactgtggtacaatgtgcttcactctgtcggcgccccgcttggcgcattgctcggttccatgatatccgagacgttccaaaggaaatggattctggccgcaagcgcttttctgactgccattgccggactgttatacggcatgacgtttattcccgtcatgattattgtgtttggctttgtcgttaacgtcacggaacggatcttcacctcaaatctatacgcctacacatcggagccgtatcctacggaatatcgctcggccgggagcgggctggcgtacgggctcggccgtttttccaatatattcggctccctgctcgtcggatttattgccgttaagctcggctacatcagcgtctttttgttcatcggcggctgctggcttctgtgttccgttttgttaatcctcttcggcccgaaaacaaatgcacagcaaatttaatcaaaaaaacagtgcggaatcactccgcactgttacactgtgatttctatcaaattgccttccccatcctctatcacgctctcataatatccgtcacccgtcacgcgcgggccgcttacaacctgaaatccatcatttttaaacgtttccgtcaattcattcacccgctccttgctgcctgtagaaaatgcgagatgcgcccatccggtcatattctgtgccggagcttcatcaatgccgccttttttcataagttccagcctgcatccggagtcaaatgtcagaaaatacgatttgaaatcttttttctcattatgataaaggtcattggccttggcgccgaagtatttctcataaaattttttcatccgttccaagtctttcacccatatcgctgcatgttcaattcgcatatgtccgcctccctttttttctcaatctatttataaagcatgaaacccatttcagctcaagactttttccgctgaaattgatgcataatttgttttttagctgtttcttcgtgaaaaaacaataaaaatgcttcctttccgacccgttccaaatgaagttccagggatggaatattcaatgcccggctgacgctcagatttcccttgccgatgatctccgcatcccatttctgttctttcgcaaactggtacaagccggcagccacgtcatcactgtgcgcatagatggctgtcggcgccttgtcgaaaccccagaagtgctcacccgcacgctttccgtcgtccatatcatggcatccgaccagaatgcgggtttcatcaagggagccgaaaaccgccttatatgcggttaccttgtcggccgtactcgggcttttttccgcttcccgcacacatgtaaaagcaacgtcttgatgtccgcggtttttcaaatacaaaaagctttctctgtatgctgcctgcctgtcattataagcgcagggaatctcttgatgctgtgtatattcacaagcgacaatgggaccgtattccaggtaaggcacggcggtttcccattcattcgcgcgggacgtgacaatcagtccgtcaatctttttcattttcagcagttcgaaataggtcatctctatagcggggtcataattggtggggagaagggttgtcacgtaatcatgggcaaacgcttccttcgtgataccgtttacaattttgtcaaagcagggatggtcactgtacggcaaaatcacgccgattgtattggtctttccgcgaatcagatcaatggcggttcgattaggggtataatccagctccttcatcacttgattcacaagacgccttttctcctcagatacgtacggatgtcggtttaatacgcgtgatacggtggccaccgacacattcgccagtttcgcaatctcttttatatttgccatgtgctcctccattttcggtgataaaaaagcagcaagagtggatttctcttactgctatctcatcataaatccactgtcatttcaacagggcaatggtcagaacccatgatatcggcacaaatggccgcttggctgatccgctgcttcagtctgtctgaaacaatgacgtaatcaagccgccaaccgatgtttttctcacgtgcgttcgtcctgtaagaccaccaggagtaggcgccttcccgatcaggatataaatagcggaatgagtcggtaaatcccgcgttcagcagggcgctgaacgcttcccgctcctgctccgagaaaccggcgttcttccggttggctttcggattttttaagtctatctccctgtgtgcgacattcagatcgccgcataagatcacgggcttcttccggtcaagcttctgcagataatccttaaaatcggcttcccattgaagacggtaatcaattcgctctaatccgcgtttggcattcggcgtataacagttgacgacaaacacatgctcaaattcaagcgtgatcacccgtccttcttgatcatggtcgtcaatccccagtccatagaacacgtgcagcggcttttctttcgaaaaaacagccgtgcctgagtagccttttttcaccgcatagttccaataggcgtgatatccttcaagctgtaatgatacttgtccgtcctgtacttttgtttcttgcagacatagaatatcggcttccgtttcctgaacgtaagtattgatatctatctttttcatcacggcacgcaagccgtttacattccaagaaatcagattcatgtgatccctcctgtccggctcagccggtatttcagtgtttcaatgtttccgccctctaatgccagcagctgctttttcatttctaaaccgcctctgaacccggtcagtttcccgttttttccgatgacgcgatggcacggaaccgtaatcaataccggatttttcccgattgcggcgcccacggctcttacggctgccggtttctgaatcatttctgctatatccgaataggagtatgtctcgccgtacggtatgtccataagcgctttccatacagcaagctgaaattctgtcccgtaaagatccaccggcactgaaaaagctgatctgccattgtcaatgtactcggacagctctgccgtgtaaggcgccagcttttcatcatcacctgccaatcggtattgcggcagtgatctttttgcccactgctcaagctcttcaaagcttccatgatttgaccctataaagcaaagccccttagatgtagcggctgtatacaggctccaatcattccgtgtgaagagtgtccaatagatcataggctctttactcatattgaacctccctgtcccattttggccgtttttctgtattctgtgggcgaactcccggttccctttttaaaaagggtcgcgaaatgcgctgtgtttggaattccgacagtcagagcgatctccatgactgtcatatcagtatgctttaaaaggtgttccgccttcgacaatcttattttctgtatatacgcaatcggggatattcccctgatttttttaaatgtccgctgtaaatgataggggctgccgtgacacatttcggccaatacgctcagagtcagggattcgtgataatggcggtcaatgtactcagtgatttgagcaatccattcttcatcaggaagacgaagaccgttcggccggcaccttttacagggacgaaaatgtctctcgagcgctgcatcagccgtatcaaacaccagcacgttttctttattcggaactctcgatttacaagaaggccgacagaaaatccccgtcgtttttaccgcataataaaatgccccgtcataagaagcatcattgtgtatgattgcgctccacttttcatcagtcaggatatttctgtctgtttccatctcagccaccccctgttcttcagtataaacaaattcattgcttaagtacgcgtttttgaatagaggagcaagataacaaagataggtgtcaggagcacttccatgtttcatgtgaaacatttcggcaggatggagagggactgatataaaaaaagagcaggagcccgcaggctcttgctcttttctttcggtttactcgccagttacgtatggaagtaaagccatttgacgtgcgcgtttgatcgcgatagtcaatttacgttggtatttcgcgtttgttccagttacacggcgaggtaagattttaccacgctcagaaacaaactttctaagaagatctacatctttgtaatcgatgtgcgtaatgccgttagaagtgaagtaacaaaccttacggcgtttcgcacgaccgcctctgcgtcctcctgccattgtcatttcccacctttctcgttatgaatatagcgataatctattagaacggaagatcatcatccgagatgtcaatcggcttgccgtcgttggcaaatggatcatcattaaagctgttcccttgatttcgtctctggttgttctgatttccgccgaacggattatcattttggcctccgccaaagtattggcctccgccgctgtttccttcgttgtatccgcctgatccagaaccgccgctgtttttaggctcaagaaattgaacactttcagcttggacttctgtcacgaagacacgctgtccctgctggttttcataatttcttgtctggagtcggccgtctacgccggcaaggcttccttttttaagaaagtttgcaacgttttcggcttgtcttctccaagtgacacaattaatgaaatcggcttcacgctctccggactggttagtgaatgtacgattcacagcaagagtaaacgtggcgacagccgcaccgcttggcgtataacgaagctctgggtcttttgtcagtcttccgactaatacaactcggttaagcatatgaaagaccaccttttaacattatatatttcaaattgcttattcttcttctttaacaacgatgtggcgaatgatatcgtcactgatcttagctaaacggtcgaattcagcaaccgctgcagcttcagactgaacgtttaagatttggtagaaaccgtcacggaaatcgttgatttcgtaagcaagacgacgtttaccccaatcttttgttccagtgatctccgctccgttagaagtcaatacgttgttgaaacgctcgataactgccttctttgactcttcgtcaatgttcggacggataatgtacataacttcgtactttttcatctgtttgcacctccttttggtctaagcggccctataatgggcaaggagcaataattctattactcacaagtttatattataccaaagctcttgtccctttacaactgtgtcctatacattaaatcggaaatgaatgacatctccgtcttggactacatattctttaccttccagacgcacttttccggcttctttcgctccggacattccaccgcctgccaaaaggtcttcataagcaaccgtttcagcgcggataaagccgcgttcaaagtcagtgtggatgatacccgcacactcaggagctttcatgccttttctgaatgtccatgcgcgcacttcctgttcgcccgccgtaaagtatgtcgcaaggccgagaagagagtatgatgctttaatcagctgatcaagacctgattcttcgatgccgagctcctcaaggaacatttgcttttcttcgccttccaattcagcaatttcagactcaattttcgcacagacgacgataacttcggcgttttcacccgcggcgtactcccggattttcgcaacatattcattatctgaaggatcagccacttcatcctcgcttacatttgctacataaagcacgggttttgacgtaagcaaatgaagctgcttcacaagcttttgctgttcttccgtaaattcaacggaacgggcaggcttttcttgttcgaaagcttcttttaatttagacagaatgtcaaattcaaaaaccgcttctttgtctttttgcttagcaagcttgcttacacgcgtgatgcgtttttcgactgtctccatgtcggcaagaatcaattcaagattgatcgtttcaatatcgtcaatcggatcgactttccctgacacgtgcgtaatattgtcatcagcgaatgcgcgtacaacgtggcagattgcatcaacctgacggatatgagaaagaaacttattaccgagtccttcaccttttgatgcgccttttacgatccccgcgatatcagtgaattcaaacgcagtcggcaccgtttttttcgggttcaccaattcagtcagcttttgcagacgttcatccggcacttccacgattcccacgttcggatcaattgtacagaacgggtagttggctgattcggcaccagcctgggtaattgcattaaataacgtcgattttccgacattcggcaaaccgacaattccagcagttaaagccattctttcatctcctctatatcaaaccatcatcgtataaacgtattgtaaacctagagcaattataaggaggttcataggaaaagacaagctgagaaaaaagcatttcccgccctctctctccttagattatccttttttaaccgctaccagacagtcaaaaagcgtacttcccattccattatcggaatttgaatcctttgtgagcatgttgacggagcctccgaatgccgcccacatgccttcatctatattcaccgtcttcggatgagcctgcttcatgattttcaccctgccgcgcagacggccgcggtcattgtatacctctgccgtatctccgtcttgaagtgaaagctcctcggcgatatccggcgacaggtccacctgaatctgctgaagcttttcaataaacggcacgtgctgtgaatgattggagcgctgcgggtgaatggacagcagcgtatacggatatttcccggccagtccggcgtcatgataaacagactcctccggcacttccaattgagggaggccgctgtatcctttctcttctgccagtgacgagacgaattcaaattttccgctcggggttaaaaattgaaaatcactccacggaacctgtttgaccggaagcggcatatgtcctttttcctttaattgctcaagggtgattccttctttctccaaagaagagagccccatttttaagaaatcttccgtactgtaatcaaacagctccccgaatccgagacgctttgcgagttccgtccagatccagcggtctgattttgcctctccctgcggttccgcaagcttcttgccatattgaacatagtgatgatacatgctggaataataaatatcttcctcttcgaaaacaacggccgtcggcagcacatagtcacagagcttcgccgtatcggtcatgaccgaatcaatggccactgtgaccggtgttttttcaaatgcttccttcactttttttgtattcggcacctgtgtcagcggattgccgcacgtcacgatgatcatctcaatcggcggatcggctgcattcagcgcctcttcggcttgagtcatcatcgaaaacgttctcgaacttttcttcagatcaggacgggtgagctcggcctttgcaaagctttcaccgacttgcacatttccgaagtttgcgccgccgcctttgataccgacatttccgctcgccgcagctaaagcgtcaatccaccgtatcgtcccgcccccgtttttatatctctgcatcccaagacccataaaagtggaggtgggaccgtcagcatataaatcagcaagatattcaatcacttctaaagacgtttctgttttctcaatgatctcctcaatagaaatcgtctgcagaagcttttctatttcttcaaaaccgaccgaatgcctttggatgaaatcggaatcggttctgccggtttggcataatatttttaaaacacccgccgcaagccagccatccatgccgggtttaacggatatataccgatcggcaagcttggcagtcgggttaaaaataggatcaatgaccgtcagtgtcactccttttttcttcacctgctgcagatgatgatagaggtgcatattcgtccgggacacgtttctgccccatacgatcacatgcttgctgtgataaatatcaagcggtccatgcccgtaagaacgcccgaaatcccagcgctgcgcttcaataccggaaccccagcaaatgctgcccgcaatctccgttacaccgccgtatccattgaaaaaacgctggtcgagcgccttcaaaagaccgttattggcgtaatcatgactgtgcagcactgcggcagtgcccaacgtctccttaatcaccgccattttttcagcaatttcatctaacgcctgctcccaggaaacgcggacaaattcgccgtctatcttttttaaaggaaaacgaagccgttccggcgcattcgttttcgcctccagcattctgccacggccgcaaattttcccttctgtaatgggatgattcgggtctccgtctactttcgtcacctttccatcctcaactgtcaccaaaaagccgcagctgtcccagcaattcagcgggcacgctgactgatgcactttgctcatcgggcctcttcctctcctctatatgaaaaagcatgagcgccagcccttatgatgtaggctcctcatgcttgacgagtacttttttcagctttctctcaaaatctcttctcggaatcatgacactgtgggaacaacccgtgcatttaatccgaatatccattcccatccgaatgattttccacctgttttcaccgcaaggatgcggtttcttcatttcaacaatatcattcaggccaaagtctttatccgccaagacccttcacctctctccatagactgctttatttattgtacaaaaaaaaacaggataagagcaacggccgcactcaaaatgagcattatacttttttccatctccctaaaatagggtaaagaagaagacatatcagcaaataaagacttaaaagcccgtaaatgggatataaaatcgcgatcaaatctgaaaaaccgattgtcgtaaaaggcaccatcacagctaacagaagagatacgagcgtccatctcggcaatttcacaaatgcaagcatgcggctggacagcccgaacagaccggtcacggttgtcgtatagatggctaaaaaaagcacggcggccatacaaagaaataacggataaggagcgccttcaaggacggcgaaaagaggaatctcatattgtgtaagactgcctgaaagctgtacaagcgtttcattgtaaacaaatgaaatcataccgaaaatcagcccgcttgcaacgcttgcgattttcgcttctcccagtcccttcatatcttttccgattgaagaaagaacagcgacaacagaaaggatgtttaaggacgtgaaagtaatgcttgccggccaattatactggcgggtcaaatctatcgtccacgtgtaatgatgggttgtctgaaaaaagaccaatgcatataacagccccgctacaagaatcggtatcaaaatactattcagagataatattccttttatatcccaaaagaataaaccgacggtcacaatgcaaagaagaaaaataccgatccaaaacggcagcttgtacatttgcagcgtcacaccgccgccggcaatcataaccatcgtcattgaaaacaaataaaacataataagcacatcatagactttagcaagagccggccccatcagatgctcaagcacaggtaaaaagtgcgttgattgaacccgatagctgatcttcaacacaatataagccgaaatcgtaaacatgactgtaaacaatacaatagccagtccgctttcgacaccgaaaaactgccatatttcctgcccgcttgcatatccagccccaatctgactgcttaatatgagcagcatccacttcatcccggctctccacaccctcatcacctcataaaatttctgatcatctccgcatattgctactatattgagtgacagcggcaatcattcatacaaaagggacaaatatggtatgataacgaagattgactattcagaaaaattcacttatgcaaggagctcaaaacatgtacatcaggcgtttaaccgcaaatgatacccagccttattccgatatcaggctcaaagctttaaaagatcacccggacgcatttgccgtcagctacgatgaggagaaagaatggccgtccgaaaaatttaaagccaggcttgaagccgacaatgccatcgtgcttggcgcctttgaaaaagacagactgataggaatcctcaagatctccaagcatccgctgtttaaactaagacacattgcggttatcggttctatgtatatttcccccaaacaccgagggtcaggcgcaggaaaagctttaatgacggaagccatcagccgagcaaaaaagatgaaggacacagaacagctccatctctctgttacctcaacaaatgaacccgcaataaaactctacgctcagttaggatttatcctcttctctacagaaaaaagagcgctgaaattggatcatcagcaatatgtcgacgtagatcaaatggtcttatttctgtcatgaacttagagaacaattgctctgggttcttttttctatcccgctcttttcaaacaaccggcatgctgatcatgacataagcataaaaaaaggcagcgctggatatactgtaaacaaccatacaacaccaaaaacaacaatgtattactcgtatgacatgacaaggaagtgaaccttatgaatcgaaaaggcgggcttttttctcaagaacgggcaaaacaatatgtatctcatacggattcttctgctgcgaatcaaatacaagcgatccttacttcatctttacgtaaagcagccggcagaccgttagtcaccgtgtgtatcggcacagatcggtcgaccggagattcattaggtccgctcgtaggaacaaagttagaaaaaatgaatttaggcagattgcacgtttacggcacgctgtcagatcctgttcacgccgtcaatatgaaagacaagctaaaagatattcaacatctacataaaaatccgtttattatagcggttgatgcttgtttaggccgcgtcaaaagcgtagggtcatttcaaatcggcgatgggccgctgaagcccggagcaggtgttcaaaaagatcttcctgaaatcggtgacgtccatatcaatggaatcgtcaatgtcagcgggtttatggagtattttgtcctgcagaatacgaggcttcatcttgttatgagcatggcaaatgttttagcagaggggttacagctgacagataaatcagaaggccggcaggaacggctcagtccgtttcataagctgacaagacgtatataaaaaaccatctttttttaaaaagatggtttttacgcttctctttcagacaatagttctaggatacgttcaagatcttcatttgagaaaaactcaatctcaatcttcccttttttcttttgtctcttaatatttactgttgttccgaagtaattttgcaaatacgattcccgctcttttaacacaacatcttggacaggttcttttttctttgtttcacgtggaacattgttgtttaactgctgaatcagctgctcaagctgacggacgttcagctgttcttcaaccactttcttcacaagcggttcaagcttgtttttatttttcaaaccaagcaaggttctgccgtgtcccatggataacgtaccttctgcaatgaggttctggatgctttccggcagtgtcagcagtcttaaatggttggcaatatgaggcctgctttttccgagccgtttagcgagctgttcctgggttaaatccaaatgcttcagcagtgagtcatatgccagagcttcttcaagcggtgataagtcttcacgctgaaggttttccaaaagagcgatttcccgcatcagcgattcagataaatcccgcacgatagccggcactgtctctttaccggcaagttttgcggcgcggtaacggcgttcgccggctacaatatcatagcccttcaatgattttctcacgataatgggctgaagaatgccatgctgaatgatggattccttcagttcagctaatgactcatcgtcaaattgttttcttggctgataaggattggggcgtaaatcactgattttaatctcttccactgtctcttcagacaaatcaacctgattaaacaacgcgttaatcccttttccgagcccgcctttagccattcgctgccacttcctttgctaaatctaaatatacttccgcacctctcgaacgcggatcgtataatatgatcggcttgccgtgactcggcgcctcacttaaacggacattgcgaggaataatggtttgatacactttatctctaaagtatttctttacctcttctatcacttgaatgccgagattcgttctggcatcaagcatcgtcagaagcactccttctatcattaagtcggtatttaaatgtttttgcacaagccgaactgtatttaataattgactcaatccttcaagagcgtagtattcgcactgaaccgggataacgactgaatctgaagcggtaagcgcattaatcgttaataacccgagagacggaggacaatcaataatcatgtaatcgtaattttgtttcacagattctaatgctcttttcagcctgacctcccgtgagatcgtcggaaccaattcgatttccgctcccgcaagctggatcgtggccggaatgacatctaagttctctactgaagtcggtttaataatatctgtaacatctgcatcatctactaaaatgtcgtacacacaatgatccacatcggctttttcaatccctaatccgctcgttgcattgccctgcggatcaatatcaacaagaagaacccttttacctatgtaagccaagcaagcccccagattaacagaagtcgtcgtcttcccgactccgcctttttggttcgtaattgctatgatttttcccacgatgtcacctaccttcacatgaacatatactgtcttgtttctatcttatcaaaaaaagagtaaagcgttttatttttttcataatttgtttatcagcaagtgaaaaaaatgtaaacgaaaaagacactttctaatataagttctccgataaagtaccttttttgactgtaaaaagacaattcacgacacaaaaagataaaattttacatatataatgtatagtgcacaataaatctatcattatatcaaaatagttttttgattaaaataaaaactcccctgctgatcaggagagtttttatttaggtatccgaatggtaagctgaatgtactcttcgaattcttcttcctcagtattcagtctgacgccgctgtcttctaccatagacagggactgacgaatcgtattcatcgcaattcttgtatccctgctgaacgctttgcgtctcggctttggtttctgcttattctgttcaagcattttcaccactctgtcttccgtctgcttgacgtttaagcttttctcaatgatttccgcaagcaatgtgacctgaaactccggctgtttgagcggaatcagtgctcttgcatgacgttccgtaatttttttctccataatcgcatcctggacgggttccgggagctttaacaatcggagcttgttcgcaatcgttgactggccttttcctaagcgctgcgccaaggcttcctgtgttaaatcatgaagttctaacagccttgcgtacgcatgagcttcctcaatggaggacaattcttccctttgcaggttttcaatcaaagcgacagatgctgtttccgtatcagaaaaatctttaataattgcgggaatcttctcccattcaagcgtctgtaccgctctccagcgcctttcacccgcaatgagctcatattgtccttcatcttctgtatgtctgacaacaatcggctgaatgatgccgtgtgtatggatagtcattgctaactctttgattttttcatctgagaaaatggtgcgtggctgaaaacggttgggaacgatagcatgtaccggtatttcgagtatctcttctttgtttgtatcatgctcagctatctccggttcctcttccttctcaccaaacccgaagaaacgagagaatgaatgcttcatgtacctacaccacctttaaaaactgccatttttataattctattttctcatggtttttcctgctgtatcttcatcaattttgcagaaaatatgatggaattgtcacatcaggctgtctaaattacccttcaattggcgatttatttggagtgcccggttttctcggatattttttcggagtgcttttcgtcttgcgaatgatcatgatgttccgttcactttcttcaacaggaagtgtaaaggaatgaacttgttcaagctctcctcccaatactttaatcgccttttgccccgctttcagctcttcatcagctgctgctgctttcagtgcggcaaatacgccgtttttcttggccagcggcagacaaagctcactcaggaccgacagacgcgccaccgcacgggccgtcacgagatcgaagctttcccgtacgtctttccgttgtccgaatgtctccgctctgtcatggacaaatgtcgtatgctctaattgtaaagcatcagagagagtttccaaaaacgtaatccgcttattcagtgaatcgacgatggtgacatgcagatgcgggaagcagattttgatgggcaggcttggaaaaccggcgccggcgccgacatcacaaagagtggtgaccttttcaaaatcaatataaaatgccgccgttatcgaatcataaaaatgcttgagataaacttcctttttctcagtgattgatgtcagattcattttttcgttccattccacgagcatccggtaatacaactcgaattgctccagctggcggtcagaaagggaaatccctttctccgctaaactggatgtaaattcctctatattcatgccgtcatcctttctattcagctaccttggcaatacggccctgctccaggtataccagcaagattgaaatgtctgccggattgacgccggaaatacgggacgcttgagcaactgataaaggacgcacttctttcagcttttgacgggcttcagtagcaattcctttaatggcgtcataatcaatccgatcagggatttttttgttttccattttcttcagcttttccacttgctgcaaggatttttcgatatatccttcatatttcacctgaatttccacttgttccgccacatcttgcggaaccggagaatctgcaggcgcaagttttgtcactgtttcatagttcatttccggacgtttcattaaatctgtgccgcgcactccgtctttcagctcgcttccgccgagtgaacggatatattcctgattctcaggagacggcttgataataacagaccagagacgttttttctccgcctcgatcgccgcttttttcttctcaaacgcttcatagcgctcatcagaaattaagccgatatcgtggccgatttccgtcagacgaagatccgcgttgtcgtgacggagcagcagtctgtattccgcccgtgaagtcagcagacggtacggttcattggttcctttcgttaccaaatcatcaatcaatacaccgatataagcatcggaacggctgaggatcacttcttcttttccaagcgctttgcggcctgcgttgatccctgccataattccttgcccggctgcttcctcataacctgatgtaccgttaatttgaccggccgtgtacaggttagggatttttttcgtctccagtgtaggccagagctgcgtcggtacaatcgcgtcatactcaatcgcgtatccggctctcatcatctgcaccttttccagtcccggaatggtcgccagcatccgctgctgcacgtcctcaggaagactcgtggataaaccttgaacgtatacttcctgcgtatttctgccttccggctcaaggaaaatctgatgacgcggtttatcattaaaccgaacgactttatcttcaatcgaagggcagtatctcggtcccgttcctttaatcataccggaatacattggtgaacgatgcaggttgctgtcgatgatctcatgagtctcaggactcgtgtaagtcagccagcaaggcagctgatcggtaatgtattcaaccgtttcatatgagaaagcgcgcggaaccgggtcccccggctggatttctgttttgctgtaatcaatggaatcgcttgagacacgaggaggcgtgcccgttttaaaacggacgagatcaaaaccgagctcctctaagtgctcagaaagtttaatagacggctgctggttattcggaccgcttgagtaagacagatcaccgagaatgatccgccctcttaaatacgttccggttgtcagcacgaccgtttttgccttatattcagcaccggtttgcgtaatgacaccgcggcactccccgtcttcaatgattaaacgctcggcaatcccttgaagaagtgtcaaattcggtgttttttccagcgtatgcttcatttcgtgctgatattggaatttatccgcctgcgcacgcagcgcccgtacggccggaccttttcctgtattcagcattctcatttgaatatgagttttatctatatttctagccatttctccgccgagcgcgtcaatttcgcggacgacaatccctttcgcggggccgccgacagacggattacatggcataaacgcaaccatatcaagattgatcgtcaaaacaagcgttttggctccctggcgcgcggatgcgagggcagcctcaacaccggcatgcccggcgccgatgacaatcacgtcgtattggcctgcttcataccccatggttttttcctcccttttatttacctaaacaaaattgtgaaaagagctgatcaattaagctttcgtggacggcatcacctatgatttcgcccagcagctcccagcaccttgtcaaatcaatttggaccatatcaatcggaacatcctgttcaattccgttcagcgcatcatcaatcgcttgctttgcctgatgcagaatcgagatatgacgggtgttgctgacataggtgagatctccgctttcgatcgctcctgtataaaatagcgactgaatcgcttcctctaaatcttgaatgccttcttctttcagcaatgaggtcgtgacgacaggccggcctttcgccagttccttgacgcgctcagcgtcaatcttagcctcaaggtccgtcttattcataatgacaatgacgtccattccctcaaccgcttcaaacaatttcacatcttcttcagaaagctcttcgctgtggttaagcacaagcaaaatgagatccgcttccttcagaacctgccgtgaccgttccacaccgattctttcgacgatgtcttctgtctcacggattccggcggtatcgacaagccgaagcggcacgcctcggacattgacatattcctcaatcacatcacgcgtcgttcccggaatatcggttacgatcgccttcgtttcatggacaaggctgttaagcagagaggattttccgacgttcggacggccgatgatcacggtagacagtccctcacgcaaaattttcccctgctcagacgtacggagcagcgcctcgatttctttcttcacgccgcttgccttctccactaaaagctgatgcgtcatttcttcgacgtcatcatattccggataatctatattaacctcaacatgggcaagtgtttctaacaactcatcacgcagacggcggacaagcgcggaaagccgtccttccatctggttcatggcgacattcatggcacggtccgttttggccctgatcagatccatcaccgcttccgcctgtgataggtcaatccgtccgtttaaaaatgcgcgcttcgtaaactcaccgggttctgccagtctcgcaccttctcttaaagcaagctggagcacctgattaaccgtcacaatacccccatgacagttgatttcaatgacatcttcccttgtgaatgttctgggcgctcttaaaacagacaccatgacttcctcaataatccgtcccgtcgtgctgtccgcgatatgcccgtaatgaatggtatgcgattctgccgaactgagcgttttgcctttcggacccttgtacattttgtcggcgatctttacggcttcagggccgctcagccgaacgatcgcaatcgcgccttcacccatcggagttgaaatcgctgcaattgtatccatgctgttcacctctctttatctctgtttccatctatataaaaaattttatttacgccaaaattaaaagataacatagtttggtttgaagtggaagatacgttatccacaaaggcagaaattcatcccttattactttaacttatccacatgtgaataacaattaattttatttcctaaaaccttttttatcaacagcatagaccgaaaaagaaaaaacttaaacgcaaaaagtgcgattctgcttaggaatagagccatttttaccaataaaaaaaccgaagttccgattttacccggacttcggttttctgctatctttatgggaaataacgaggtggcggtaccggccttcaccggtagaaaacgttttgatatttggatgctttgacagcgcgtcatggatgatttttctttcacctgacggcatcggttctaaatgcacatcttttttcgttttcgacacttgcttggccagcctgtttgccagctgctccagaatttctcttcttttccgccgataattctcagcgtcgacaacggcttggcgatactggccggagccgcggttcaaaacaagctgcgtcaatgtttccagggcattgagtgtttgtcctcttttgccaataagcagcgccgctttttcacctttaatgtgaaaacagactgttttcttgttttcttccgtaacaatctcagaaggtccggcaatggaatggatgatttcttccaaatacgctttcgcttcatgaacaggattttttttctcttccagttctacgatcgcattcttttttccgaaaatacccaaaaaccctttgtatccttcttgcaccaccgttatttctacttgatctttcgtcagttgaagttcctgaaggcctgattgaactgcttcttcgacattccgtcccgcagcagtcaccttcttcactttttctttcctcccgctttctgcgtttccggatcgtgtttaatgtcaggtcctttaataaggaatgtctgagcaatcataaacaggtttccgactacccaatacagagaaagcgcgctcgggaagttgatcgcaaatacgatgatcatgatcggcataatccataccatcatcgccatttgaggattctgagtcggatttccggccatcatcagcttctgctggacaaaagtggccacaccggcaacgataggaagaatatagtaaggatccttctctcctaggtcaaaccataaaaagctgtgctgtgaaatggcttgcgtacgcataatggcgtggtagaatccgatcaaaatcggcatttgaatcaggatcgggaaacatccggccagcgggtttaccccgtgctttgaaaacagggccatcgtttcctgctgaagcttctgctgcgttttttgatctttagagctgtatttttctctgagcttctgcatttcaggctgcagcgcctgcatcgcttttgagcttcgaagctgcttgatcatcagcggcagaatcagcagacgaattaaaatcgtaacgatgataatcgataaaccatagttatcgcccgtcagtttcgctacgtacgtaatgacttctgacaatggatacacaacatatttgtcccagaaatgcggactattcgccgtaatcggctctttcacactcgagcacccggccagcagcacgagcataccgaccatactcagtagtaaccatattctccttttcaagaacgtttcctcctataccaatctttatgaaccttgtatgtattttagcatctttcagtttcaaatggcgttcatttttcgccaaataaaaggaagcgcttttaaaaacgtgaagaaaacaaaatatgagctattttgacgaagatttcttatataatgaggtttttctgaataagtgctgcagactctttttcgtttcttcaaaactgaggtcgccggcgggttttcttgcgataataataaaatctttcggcttgagcagctctttttcctcctgaacagcctgtctgattaaccgcttcacccgattgcgcacgacggcattgccgatttttttactgacagaaagccctacccggagctcttcctgtttcggctgatcaagcgtatacagcacgaactggcggtttgccatagacgttccgcgtttaaacactttttgaaaatcttcatttttctttaaccgatttcgcttcttcactttaattcactccgatattcactcgcagaaacttttatttctatctaaaaaaaacgggccgccggaatactgaagaaatttctccagtaccgggcgacgcatgacatctcactctcttaatgtgaaaaaagaccactgacattattcagtggcctaagctgataatacttttctgcctttgcggcgacggcgtgctaatactagacgaccgttttttgaactcatacggcttctgaagccatgaactttactgcgtttacggttattcggttggaatgttcttttcatttatgacacctccctcgaggaatagctgttaaagacagtcttacttattatatttgtgctgcctattcattgtcaacttcagcagtgcttttatttcttacaaccataataggataacataccttaaccagtttagaaaccttatttttcatattcctttttttaacgcaaaaaaaaagccgcgctcccccggaaaaacgacatgtggataatttttttgcctttttttaatatccacagtcgttatcgacaacattttcacattgctaactcctgtggacaaagatttttcaacaagttgtcaggtttgtggataagattacgagaaccattgcaagtcctcgcttaatttgatattatatttgtgttttaactcttaattacttatccagcccattctctttatccacaaactgtggataagttgtggattgttttcacacagcttgtgtagattgttgtccacaacttgtggaatttgtcgaaaagctgtttttctactatactatatgttttcaacatttcgtgtgtacgaatggtcagagccatatgctctttttttgtgttctataacagggaaagggcgctgatttttaaagaaaaggagggctgtgccggataatggagaatatattagatctttggaatcaagctctagctcaaattgagaaaaagctaagcaaaccgagtttcgaaacttggatgaagtcgacgaaagcccattcgctgcaaggggataccttaaccatcaccgctcccaatgaatttgccagagactggctggagtccaggtacttacatctcattgcagataccatatacgaattaaccggggaagaattgagcgtcaaatttgtcattcctcaaaatcaggacgaagaaaactttttaccgaaaccgcaagtgaaaaaagcggcaaaagaggaaccgtctgattttccccaaagcatgctcaacccgaaatatacattcgacacattcgtcatcggatcgggaaaccgattcgcccatgcagcatcactggctgtggcggaagcacccgctaaagcgtacaaccctttatttatatacgggggagtcggcttaggaaaaacccacttaatgcacgcaatcggccattatgtcattgatcataatccttcagccaaagtggtgtacctgtcttctgaaaaattcacaaatgaattcatcaactcaatccgcgataataaagccgttgatttccgcaaccgctatcggaacgttgatgtacttttgatagatgatattcaatttttagccggaaaagaacaaacacaggaagagtttttccatacattcaacacgcttcatgaagaaagcaaacaaatcgtgatttccagcgacagaccgccgaaagagatcccgacccttgaagaccgcctgcgttcgcggttcgaatggggattgattacggatatcacaccgccggatctggaaacgcggattgccatcctgagaaaaaaagcgaaggcggaaggccttgatattccgaacgaggtcatgctttacatcgcgaatcagattgacagcaacatccgcgaactggaaggggcattaatccgggttgtcgcctattcatctttaatcaataaagacattaacgcagacctggctgcagaagcattgaaagatattattccgtcttctaagccgaaggtcattacgataaaagagattcagcggattgtcggacagcagttcaacattaagcttgaagatttcaaagcgaaaaagcgcacgaaatccgtggcgttcccaagacaaattgcgatgtatctttcaagagaaatgacagattcttctttgcctaaaatcggggaagaatttggcgggagagaccatacaaccgtcattcacgcccatgaaaagatttcaaaactgctgattgatgacgagcagcttcagcagcaggtgaaagaaataaaagaactgcttaaataatagtgccctcggatgaatcggggaaagtgtgaataactttttcatagccatacacagtctgtccacatgtggataggctgtgtttcctgtctttttcacaacttatccacaaatccacaggccctactattactactgctatttttaaaatatattaattatattatccgttaggaggataaacatgaaatttacgattcaaaaagatcgtttagtcgaaagtgtacaagacgttctaaaagccgtttcatccagaaccacaattcccattctcaccggtattaagatcgtcgcctcagatgaaggagtatctttcacgggaagtgactctgatatttcaatcgagtcattcattccgaaagaagaagaagataaagaaatcgtgacgatcgatcagccgggaagtatcgtgctgcaagcgcgtttcttcagcgaaatcgttaaaaaacttccgatggcgactgttgaaatcgaagttcaaaatcaatatttaacgattatccgttccggaaaagccgaatttaatttaaacggccttgatgcagatgaatatccgcatctgccgcaaatcgaagagcatcacgccattcagattccgacggatcttttgaaaaacctgattcgccaaaccgtgttcgctgtgtccgcctcagaaacacgccctatcttgacaggtgtaaactggaaagtcgaaaacggtgaattattatgcactgccacggatagccaccgactcgctttaagaaaggcgaagcttgatattccggaagacagctcttataacgtggtcattcccgggaaaagcttaactgagctgagcaaaattcttgatgacaaccaagaactggttgatatcgtcattacagaaacccaagttctgttcaaaacgaaaaacgtattgttcttctcaagattgcttgatggaaactatccggacacgaccagcttaattccgcaggaaagcaaaacggaaatcgtcgtgaacacgaaggaatttttacaggcgatagaccgtgcttctttattggcgagagaaggccgcaacaacgttgtaaagctttctgccaaaccggcggattcgctggagatttcatcaaattctccggaaatcgggaaagtggtcgaagctgtgctggctgaccagattgacggcgaggaattaaatatttcattcagtccaaaatatatgatggacgcactgaaagtacttgaaggagcggacatccgtatcagctttacgggagcgatgagaccgtttcttatccgtacgccgaatgatgaaaccatcgttcagctcatccttccggtcagaacgtattaatcaaacagaatgtgctgccggcttagttcggcagcttttctattcatcagccgctccctcaagttttccctttccttatttcaggattttttagtacaattagatattagtgatatttgaaagaggtcgataatatggcaaatccgatttcgattgatacagaaatgattacgcttggccagtttttaaaattagccgatgtgattcagtccggcggcatggcgaagtggtttctgagcgagcatgaggtgactgtcaacaatgaacctgacaatcgccgcggcagaaagctttacgttggagacgtggtcgcgattgaaggatttggttcatttcaagtcgtcaattaaagcgggtgacagcggttgtatatccaaaatttagaattaacatcctaccgtaattatgagcgcgctgagcttcaattcgaaaacaaggtgaatgtgatcatcggggaaaatgcccaaggcaaaaccaatctgatggaagccatctatgtcctttcgatggcaaaatcacaccgcacctcaaatgacaaagaacttatacggtgggacgaagactatgctaaactagaaggaagagtgatgaagcgaaacggggacatcccgatgcagcttgtcatctccaaaaaaggtaaaaagggcaaggtcaatcatatagagcagcaaaaactcagtcagtatgtcggagcgctgaacaccattatgtttgcccctgaggatttaaatctcgtcaaaggaagccctcaggtaaggaggagatttctcgatatggagatcgggcaggtttctgccgtttatctgtatgatttatctctgtatcaaaaaatcctttcacagcggaatcattttctgaaacagctgcaaagccggaaacagactgaccggaccatgcttgacgttctcactgatcagctgattgaagcagctgcaaaagttgtcgccaaacgtctgcagtttacggcgcagcttgaaaaatgggcgcagccgatccattccggcatttcccggggacttgaagaactgacgcttaagtatcacacggcgcttgatgtatcagatcccaaagatttgtcgaaaataggtaacagctaccaggagtctttttcgaaattaaaagaaaaagaaatagaacgaggcgtcacattattcggaccgcatcgggatgatgtccttttttatgtgaacggacgcgatgtgcagacgtacggttcgcagggacagcagcgtacgacggctttgtctttgaagctggccgaaatagatttgattcatgaagaaatcggagaataccccattttacttttggatgatgtactaagcgagctggatgattaccgacagtcccatttgcttcatacgatccaaggccgtgtgcagacatttgtcaccacgacaagcgtggatggcattgaccacgataccttacatcaagcaggaatgttccgtgtggaaaacggtacgttagtgaagtgaagaaatgaggtgagcgattgtatattcatttaggtgacgactttgtcgtttcaacacgcgatatcgtcggcatttttgactgcaaggtcaatgtatcgccgatcgttgaagaatttctggacagacagaaagaaaaagtagtgccgtccgtaaacggcacgccaaagtctatcgtagtcacgactgagaatatatattactctcccttatcttccggcacactgaagaaacgtgcgcaatttatgttagaaatagattcttagcggatctttacaatgaatatatcgtttaagaaaagtgtaggtgaatgtgcatggctatggaacagcagcaaaatagttatgatgagaatcagatacaggtattagaaggtttggaagctgttcgaaagagaccggggatgtacatcggatcaactaacagcaaaggccttcaccacttggtgtgggaaatcgtcgacaacagtattgacgaagccctggccggttattgtacagatattaacatcgagattgaaaaagataacagcattaccgttaaggacaacgggcgcggcattccggtcggtatccaggagaagatgggccgccctgcggttgaagtcatcatgaccgttctccacgccggcggtaaatttgacggaagcggatataaagtatccggcggtcttcacggtgtaggggcgtctgtcgtaaacgccttgtcgaccactcttgacgttacggttcatcgtgacggaaaaatccactatcaggcgtacgagcgcggtgtacctgtggccgatcttgaagtgatcggtgatactgataagaccggaacgattacgcacttcgttccggatccggaaattttcaaagaaacaaccgtatacgactatgatctgctttcaaaccgtgtccgggaattggccttcctgacaaaaggcgtaaacatcacgattgaagacaaacgtgaaggacaagaacggaaaaacgagtaccactacgaaggcggaatcaaaagctatgttgagtacttaaaccgttccaaagaagtcgttcatgaagagccgatttatatcgaaggcgagaaagacggcataacggttgaagttgcattgcaatacaacgacagctatacaagcaatatttattctttcacgaataatatcaacacatacgaaggcggcacgcacgaggccggatttaaaaccggtctgacccgtgtcataaacgactatgcaagaagaaaagggattttcaaagaaaatgatccgaatttaagcggggatgatgtgagagaagggctgactgccattatttcaattaagcaccctgatccgcaattcgaaggtcagacgaaaacgaagctcggcaactccgaagcgagaacgatcactgatacgctgttttcttctgcgctggaaacattccttcttgaaaatccggactcagcccgcaaaatcgttgaaaaaggtttaatggccgcaagagcgcggatggcagcgaaaaaagcgcgggaattgacccgccgcaaaagtgcgcttgagatttccaatctgccgggcaaactggcggactgttcttctaaagatccgagcatttccgagctgtatatcgtagagggtgactctgcgggcggatcagcgaaacagggacgggaccgtcatttccaagccattctgccgctgcgcggtaagattctgaacgttgagaaagccagacttgataagattctctcaaacaatgaggtcagatcaatgatcacggccctcggaacaggaatcggagaagattttaatcttgaaaaagcgcgttatcataaagtggtcatcatgacggatgccgatgttgacggcgcccacatcagaacgcttttattaacgttcttctacagatacatgcgggaaatcatcgaaaacggctatgtctacattgcccagccgccgctttataaagtgcagcagggaaaacgggtggaatacgcttataacgataagcagcttgatgagctgttaaaagagcttccgcaatcacctaagcccggcctccagcgttataaaggtcttggagaaatgaacgcgactcagctttgggaaacgacaatggaccctgcgaccagaacgcttctgcaagtcaatcttgaagatgcaatggacgctgacgagacttttgaaatgctgatgggtgacaaagtagaaccgcggagaaacttcatagaagcaaacgccagatacgtgaaaaatcttgatatttaaccaagaaagccttattttcgttaagaaataaggcttttttctcaaagcggcttctaaagcctctgaaaacccgcaaaacccgtatattctactaaattaatgtgtataaacacaagtttattgatataatggagaatagtgaaatcgtattgaagatcataatggacaatctactcccacattatttcatgtgatacttcagggaggtttttttaatgagtgaacaaaacacaccacaagtacgtgaagtcaatatcagtcaggaaatgcggacatccttcctggactatgcaatgagcgttatcgtatcccgggcgcttccggatgtgcgtgacggtctgaagccggttcacagacggattttgtacgcaatgaatgatttaggcatgaccagtgacaaaccatataaaaaatctgcccgtatcgtcggtgaagttatcggtaagtaccacccgcacggtgactcagcggtttacgaatcaatggtcagaatggcgcaggattttaactaccgctacatgcttgttgacggacacggcaacttcgggtcggttgacggcgactcagcggccgcgatgcgttacacagaagcgaggatgtcaaaaatcgcaatggaaattctgcgtgacattacgaaagacacgattgactatcaagataactatgacggttcagaaagagaacctgccgtcatgccttcgagatttccgaatctgctcgtaaacggagctgccggtattgcggtcggaatggcgacaaatattcctccgcatcagcttggggaagtcattgaaggcgtgcttgccgtaagtgagaatcctgagattacaaaccaggagctgatggaatacatcccgggcccggattttccgactgcaggtcagattttgggccggagcggcatccgcaaggcatatgaatccggacggggatcaatcacaatccgggctaaggctgaaatcgaagagacatcatcgggaaaagaaagaattattgtcacagaacttccttatcaggtgaacaaagcgagattaattgaaaaaatcgcagatcttgtccgggacaaaaaaatcgaaggaattaccgatctgcgtgacgaatccgaccgtaacggaatgagaatcgttattgagatccgccgtgacgccaatgctcacgtcattttgaataacctttacaaacaaacggccctgcagacgtctttcggaatcaacctgctggcgctcgttgacggacagccgaaggtactaagcctgaaacaatgtctggagcattatcttgatcaccaaaaggttgtgatccggcgcagaacggcttacgaactccgcaaagcggaagcgagagctcacattctggaaggtttaagaattgctctcgatcatttagatgccgttatttctcttatccgcaattcccagacggctgaaattgcgagaacaggtttgatcgaacaattctcactgactgaaaaacaagcgcaagccattctggatatgcgccttcagcgattaaccggtctggagcgcgaaaagattgaagaggaatatcaatcacttgttgcgcttatcgccgagctgaaagatattttagccaatgaagaaagagttcttgagatcatccgtgaagaactcaatgaaatcaaagagcgtttcaatgatgagagacgcactgaaatcgtgacgtcgggtcttgaaacaattgaagatgaagatcttatcgagagagaaaacatcgtcatcacattgacccataacggctatgttaaacgtctcccggcgtccacataccgcagccaaaaacgaggcggaaaaggcgtacagggaatgggaacgaatgaagatgactttgtggaacacttaatttccacatcaacgcacgatacgatcctgttcttctctaataaagggaaggtataccgttctaaagggtatgaaatccctgaatacggccgtacggcaaaaggcattccgattattaaccttctggaggttgaaaaaggcgaatggattaatgccattattccggtcagcacgtttgatgaggagcaatacctcttctttacgaccaaacaaggggtgtcgaaacgtacggcactgtcccagtttgcgaatatacggaataacgggctgatcgccctaggcctccgggaagacgatgaactgatggccgtccgcctgactgacggcaagaaacaaatcatcatcggaacgaagaacggtttgctgatccgtttccctgaagaagatgtaagacaaatgggacgcacagctgcgggtgttaaaggcatcacgctgacagacgatgatgtcgttgtaggcatggagattcttgaagaagactcccatgtcctcatagtgacagaaaacggctacggcaaacgcacaccggcttcagaatacagagttcaaagccggggcggaaaaggccttaaaacatgtaaaatcactgacagcaacggtccgttagtaaccgtgaaagcaacaaaaggcgaagaggacttaatgattattacggcaagcggcgtgttaatcagaatggatattaatgatatctccactacgggacgcgtaacacaaggcgtccgtctgatccgcatgtctgatcaagagcatgtagccactgtggcgcttgtggaaaagaatgaagaagagccggaagaaacggaagaagtataaacgtaaaagcgcagctgcaacaggctgcgcttttactatataaagaaatgaaaaaaaagctttgacacatagtgatgatgctgatataatcatttttgttgtctttttaatagaaaggcaagcctagcgaaaatattttttaaaaaagtattgacctagcaaactgaaaatgttatgattaagaggtcgcttcgagagaagcaacaaagttctttgaaaactaaacaagacaaaacgtacctgttaattcaaagttttaaataaatcgcacagcgatgtgcgtagtcagtcaaactactttatcggagagtttgatcctggctcaggacgaacgctggcggcgtgcctaatacatgcaagtcgagcggacagatgggagcttgctccctgatgttagcggcggacgggtgagtaacacgtgggtaacctgcctgtaagactgggataactccgggaaaccggggctaataccggatggttgtctgaatcgcatggttcagacataaaaggtggcttcggctaccacttacagatggacccgcggcgcattagctagttggtgaggtaacggctcaccaaggcgacgatgcgtagccgacctgagagggtgatcggccacactgggactgagacacggcccagactcctacgggaggcagcagtagggaatcttccgcaatggacgaaagtctgacggagcaacgccgcgtgagtgatgaaggttttcggatcgtaaagctctgttgttagggaagaacaagtgccgttcaaatagggcggcaccttgacggtacctaaccagaaagccacggctaactacgtgccagcagccgcggtaatacgtaggtggcaagcgttgtccggaattattgggcgtaaagggctcgcaggcggtttcttaagtctgatgtgaaagcccccggctcaaccggggagggtcattggaaactggggaacttgagtgcagaagaggagagtggaattccacgtgtagcggtgaaatgcgtagagatgtggaggaacaccagtggcgaaggcgactctctggtctgtaactgacgctgaggagcgaaagcgtggggagcgaacaggattagataccctggtagtccacgccgtaaacgatgagtgctaagtgttagggggtttccgccccttagtgctgcagctaacgcattaagcactccgcctggggagtacggtcgcaagactgaaactcaaaggaattgacgggggcccgcacaagcggtggagcatgtggtttaattcgaagcaacgcgaagaaccttaccaggtcttgacatcctctgacaatcctagagataggacgtccccttcgggggcagagtgacaggtggtgcatggttgtcgtcagctcgtgtcgtgagatgttgggttaagtcccgcaacgagcgcaacccttgatcttagttgccagcattcagttgggcactctaaggtgactgccggtgacaaaccggaggaaggtggggatgacgtcaaatcatcatgccccttatgacctgggctacacacgtgctacaatggacagaacaaagggcagcgaaaccgcgaggttaagccaatctcacaaatctgttctcagttcggatcgcagtctgcaactcgactgcgtgaagctggaatcgctagtaatcgcggatcagcatgccgcggtgaatacgttcccgggccttgtacacaccgcccgtcacaccacgagagtttgtaacacccgaagtcggtgaggtaacctttatggagccagccgccgaaggtgggacagatgattggggtgaagtcgtaacaaggtagccgtatcggaaggtgcggctggatcacctcctttctaaggtttttaacggaatataagaccttgggtcttataaacagaacgttccctgtcttgtttagttttgaaggatcattccttcaaaacataggaacacctgctaaatgcgccacttcctgtggcaacgcatgtgttagcatgtcctatgcgttgttctttgaaaactagataacagaagtaattcacattcaattagtaatgcaagatatcacgtagtgattctttttaacggttaagttagaaagggcgcacggtggatgccttggcactaggagccgatgaaggacgggacgaacaccgatatgcttcggggagctgtaagcaagctttgatccggagatttccgaatggggaaacccaccactcgtaatggagtggcatccatatctgaatatataggatatgagaaggcagacccggggaactgaaacatctaagtacccggaggaagagaaagcaaatgcgattccctgagtagcggcgagcgaaacgggaccagcccaaaccaagaggcttgcctcttggggttgtaggacactctgtacggagttacaaaggaacgaggtagaygaagaggyctggaaaggcccgccataggaggtaacagccctgtagtcaaaacttcgttctctcctgagtggatcctgagtacggcggaacacgtgaaattccgtcggaatccgggaggaccatctcccaaggctaaatactccctagtgaccgatagtgaaccagtaccgtgagggaaaggtgaaaagcaccccggaaggggagtgaaagagatcctgaaaccgtgtgcctacaagtagtcagagcccgttaacgggtgatggcgtgccttttgtagaatgaaccggcgagttacgatcccgtgcaaggttaagcagaagatgcggagccgcagcgaaagcgagtctgaat

(The sequence listing continues in the following parts.)

1. An antifungal composition comprising a bacterial mixture, wherein the bacterial mixture consists essentially of Bacillus subtilis 34 KLB and Bacillus amyloliquefaciens at a ratio of about 10:1 to 1:10 by colony-forming unit (CFU), and wherein the antifungal composition can inhibit the growth of Ganoderma lucidum at least 10% more than either Bacillus subtilis 34 KLB or Bacillus amyloliquefaciens alone with the same CFU as the antifungal composition.

2. The antifungal composition of claim 1, wherein the bacterial mixture is a powder.

3. The antifungal composition of claim 2, wherein each bacteria in the bacterial mixture is individually fermented, harvested, dried, and ground to produce a powder having a mean particle size of about 200 microns, with greater than 60% of the mixture in the size range between 100-800 microns.

4. The antifungal composition of claim 1, wherein the bacterial mixture is a liquid.

5. The antifungal composition of claim 1, having a bacterial concentration of 10⁹ to 10¹¹ CFU/g.

6. The antifungal composition of claim 1, further comprising a water-soluble diluent.

7. The antifungal composition of claim 6, wherein the water-soluble diluent is selected from the group consisting of dextrose, maltodextrin, sucrose, sodium succinate, potassium succinate, fructose, mannose, lactose, maltose, dextrin, sorbitol, xylitol, inulin, trehalose, starch, cellobiose, carboxy methyl cellulose, dendritic salt, sodium sulfate, potassium sulfate, and a combination thereof.

8. The antifungal composition of claim 1, wherein the bacterial mixture consists of Bacillus subtilis 34 KLB and Bacillus amyloliquefaciens.

9. A method of treating or preventing Black Sigatoka in a banana plant, the method comprising contacting the banana plant with the antifungal composition of claim 1.

10. The method of claim 9, wherein the banana plant is contacted with the antifungal composition monthly throughout the fruit growth cycle.

11. The method of claim 9, wherein the method reduces the disease severity by at least 10% as compared to a control plant absent any treatment.

12. A method of treating or preventing Fusarium wilt in a plant, the method comprising contacting the plant with the antifungal composition of claim 1.

13. The method of claim 12, wherein the plant is contacted with the antifungal composition monthly.

14. The method of claim 12, wherein the method reduces the disease severity by at least 10% as compared to a control plant absent any treatment.

15. The method of claim 12, wherein the plant is selected from the group consisting of tomato, tobacco, legumes, cucurbits, sweet potatoes, mangos, Papayas, pineapple, coffee, spinach, and banana.

16. A method of treating or preventing a disease in a plant selected from: anthracnose;
ghost spot;
a leaf spot disease;
crown rot;
stem blight;
citrus mold;
leaf blight;
fruit rot;
brown rot;
black rot;
gray mold;
black mold;
cigar-end rot;
blight caused by Xanthomonas axonopodis pv. dieffenachiae;
decay caused by an Acidovorax species, an Enterobacter species, or a combination thereof;
Cercospora leaf spot;
branch canker and dieback;
Verticillium wilt caused by a Verticillium species; and
pineapple rot,
the method comprising contacting the plant with the antifungal composition of claim 1.

17. (canceled)

18. The method of claim 16, wherein the plant is contacted with the antifungal composition monthly.

19. The method of claim 16, wherein the method reduces the disease severity by at least 10% as compared to a control plant absent any treatment.

20. The method of claim 16, wherein the plant is selected from the group consisting of tomato, mango, Aloe, turfgrass, ash, birch, walnut, buckeye, elm, hornbeam, maple, oak, sycamore, Catalpa, dogwood, hickory, linden, taro, Papaya, wheat, an apple tree, a cherry tree, a peach tree, banana, strawberry, pineapple, fig, peach, grapes, orange, grapefruit, lime, almond, cherry, plum, apricot, potatoes, peppers, a fruit tree, an ornamental plant, an apricot tree, a plum tree, a nectarine tree, cyclamen, poinsettia, Primula, impatiens, Begonia, Nicotiana geranium, sweet peas, grape plant, artichoke, asparagus, bean, beet, blackberry, black-eyed pea, banana plant, Liberian coffee tree, an avocado tree, cocoa tree, beach morning glory, watermelon, milo, and poplar.

21-105. (canceled)
